(19) United States
(12) Patent Application Publication
(10) Pub. No.: US 2023/0173107 A1
(43) Pub. Date: Jun. 8, 2023

(54) GUIDE RNA THAT TARGETS A MUTANT HUMAN INOSINE MONOPHOSPHATE DEYDROGENASE I ALLELE

(71) Applicant: EmendoBio Inc., Wilmington, DE (US)

(72) Inventors: Lior Izhar, Tel Aviv (IL); David Baram, Nir Zvi (IL); Joe Georgeson, Rehevot (IL); Michal Golan-Mashiach, Ness-Ziona (IL); Asael Herman, Ness-Ziona (IL); Rafi Emmanuel, Ramla (IL)

(73) Assignee: EmendoBio Inc., Wilmington, DE (US)

(21) Appl. No.: 16/203,056

(22) Filed: Nov. 28, 2018

Related U.S. Application Data
(60) Provisional application No. 62/680,481, filed on Jun. 4, 2018.
(60) Provisional application No. 62/591,344, filed on Nov. 28, 2017.

(51) Int. Cl. A61K 48/00; C12N 9/22; A61P 27/00

(52) U.S. Cl. CPC A61K 48/0066; C12N 9/22; A61P 27/00; C12Y 301/00

(57) ABSTRACT

RNA molecules comprising a guide sequence portion having 17-20 nucleotides in the sequence of 17-20 contiguous nucleotides set forth in any one of SEQ ID NOs: 1-3010 and compositions, methods, and uses thereof.

[0001] This application claims the benefit of U.S. Provisional Application No. 62/680,481, filed Jun. 4, 2018 and U.S. Provisional Application No. 62/591,344, filed Nov. 28, 2017, the contents of each of which are hereby incorporated by reference.

[0002] Throughout this application, various publications are referenced, including referenced in parenthesis. The disclosures of all publications mentioned in this application in their entireties are hereby incorporated by reference into this application in order to provide additional description of the art to which this invention pertains and of the features in the art which can be employed with this invention.

### REFERENCE TO SEQUENCE LISTING

[0003] This application incorporates-by-reference nucleotide sequences which are present in the filed named “181128_90238-A_Sequence_Listing_ADR.txt”, which is 551 kilobytes in size, and which was created on Nov. 27, 2018 in the IBM-PC machine format, having an operating system compatibility with MS-Windows, which is contained in the text file filed Nov. 28, 2018 as part of this application.

### BACKGROUND OF INVENTION

[0004] There are several classes of DNA variation in the human genome, including insertions and deletions, differences in the copy number of repeated sequences, and single nucleotide polymorphisms (SNPs). A SNP is a DNA sequence variation occurring when a single nucleotide (adenine (A), thymine (T), cytosine (C), or guanine (G)) in the genome differs between human subjects or paired chromosomes in an individual. Over the years, the different types of DNA variations have been the focus of the research community either as markers in studies to pinpoint traits or disease causation or as potential causes of genetic disorders.

[0005] A genetic disorder is caused by one or more abnormalities in the genome. Genetic disorders may be regarded as either “dominant” or “recessive.” Recessive genetic disorders are those which require two copies (i.e., two alleles) of the abnormal/defective gene to be present. In contrast, a dominant genetic disorder involves a gene or genes which exhibit(s) dominance over a normal (functional/healthy) gene or genes. As such, in dominant genetic disorders only a single copy (i.e., allele) of an abnormal gene is required to cause or contribute to the symptoms of a particular genetic disorder. Such mutations include, for example, gain-of-function mutations in which the altered gene product possesses a new molecular function or a new pattern of gene expression. Other examples include dominant negative mutations, which have a gene product that acts antagonistically to the wild-type allele.

### Retinitis Pigmentosa

[0006] Retinitis pigmentosa (RP) is a clinically and genetically heterogeneous group of inherited degenerative retinal disorders. RP may be inherited in an autosomal dominant, recessive, or x-linked manner and there are multiple genes that, when mutated, may cause the retinitis pigmentosa phenotype. Mutations in the inosine monophosphate dehydrogenase 1 gene (IMPDH1) have been associated with a type 10 form of autosomal dominant retinitis pigmentosa (RP10).

### SUMMARY OF THE INVENTION

[0007] Disclosed is an approach for knocking out the expression of a dominant-mutated allele by disrupting the dominant-mutated allele or degrading the resulting mRNA.

[0008] The present disclosure provides a method for utilizing at least one naturally occurring nucleotide difference or polymorphism (e.g., single nucleotide polymorphism (SNP)) for distinguishing/discriminating between two alleles of a gene, one allele bearing a mutation such that it encodes a mutated protein causing a disease phenotype (“mutated allele”), and the other allele encoding for a functional protein (“functional allele”). In some embodiments, the method further comprises the step of knocking out expression of the mutated protein and allowing expression of the functional protein.

[0009] According to embodiments of the present invention, there is provided a first RNA molecule comprising a guide sequence portion having 17-20 nucleotides in the sequence of 17-20 contiguous nucleotides set forth in any one of SEQ ID NOs: 1-3010.

[0010] According to embodiments of the present invention, there is provided a first RNA molecule comprising a guide sequence portion having 17-20 contiguous nucleotides set forth in any one of SEQ ID NOs: 1-3010.

[0011] According to some embodiments of the present invention, there is provided a composition comprising an RNA molecule comprising a guide sequence portion having 17-20 nucleotides in the sequence of 17-20 contiguous nucleotides set forth in any one of SEQ ID NOs: 1-3010 and a CRISPR nuclease.

[0012] According to some embodiments of the present invention, there is provided a method for inactivating a mutant IMDPH1 allele in a cell, the method comprising delivering to the cell a composition comprising an RNA molecule comprising a guide sequence portion having 17-20 nucleotides in the sequence of 17-20 contiguous nucleotides set forth in any one of SEQ ID NOs: 1-3010 and a CRISPR nuclease.

[0013] According to some embodiments of the present invention, there is provided a method for treating retinitis pigmentosa, the method comprising delivering to a subject having retinitis pigmentosa a composition comprising an RNA molecule comprising a guide sequence portion having 17-20 nucleotides in the sequence of 17-20 contiguous nucleotides set forth in any one of SEQ ID NOs: 1-3010 and a CRISPR nuclease.

[0014] According to some embodiments of the present invention, there is provided use of a composition comprising an RNA molecule comprising a guide sequence portion having 17-20 nucleotides in the sequence of 17-20 contiguous nucleotides set forth in any one of SEQ ID NOs: 1-3010 and a CRISPR nuclease for inactivating a mutant IMDPH1 allele in a cell, comprising delivering to the cell the composition comprising an RNA molecule comprising a guide sequence portion having 17-20 nucleotides in the sequence of 17-20 contiguous nucleotides set forth in any one of SEQ ID NOs: 1-3010 and a CRISPR nuclease.

[0015] According to embodiments of the present invention, there is provided a medicament comprising an RNA molecule comprising a guide sequence portion having 17-20 nucleotides in the sequence of 17-20 contiguous nucleotides set forth in any one of SEQ ID NOs: 1-3010 and a CRISPR nuclease for use in inactivating a mutant IMDPH1 allele in a cell, wherein the medicament is administered by delivering to the cell the composition comprising an RNA molecule comprising a guide sequence portion having 17-20 nucleotides in the sequence of 17-20 contiguous nucleotides set forth in any one of SEQ ID NOs: 1-3010 and a CRISPR nuclease.

[0016] According to some embodiments of the present invention, there is provided use of a composition comprising an RNA molecule comprising a guide sequence portion having 17-20 nucleotides in the sequence of 17-20 contiguous nucleotides set forth in any one of SEQ ID NOs: 1-3010 and a CRISPR nuclease for treating ameliorating or preventing retinitis pigmentosa, comprising delivering to a subject having or at risk of having retinitis pigmentosa the composition of comprising an RNA molecule comprising a guide sequence portion having 17-20 nucleotides in the sequence of 17-20 contiguous nucleotides set forth in any one of SEQ ID NOs: 1-3010 and a CRISPR nuclease.

[0017] According to some embodiments of the present invention, there is provided a medicament comprising the composition comprising an RNA molecule comprising a guide sequence portion having 17-20 nucleotides in the sequence of 17-20 contiguous nucleotides set forth in any one of SEQ ID NOs: 1-3010 and a CRISPR nuclease for use in treating ameliorating or preventing retinitis pigmentosa, wherein the medicament is administered by delivering to a subject having or at risk of having retinitis pigmentosa the composition comprising an RNA molecule comprising a guide sequence portion having 17-20 nucleotides in the sequence of 17-20 contiguous nucleotides set forth in any one of SEQ ID NOs: 1-3010 and a CRISPR nuclease.

[0018] According to some embodiments of the present invention, there is provided a kit for inactivating a mutant IMDPH1 allele in a cell, comprising an RNA molecule comprising a guide sequence portion having 17-20 nucleotides in the sequence of 17-20 contiguous nucleotides set forth in any one of SEQ ID NOs: 1-3010, a CRISPR nuclease, and/or a tracrRNA molecule; and instructions for delivering the RNA molecule; CRISPR nuclease, and/or the tracrRNA to the cell.

[0019] According to some embodiments of the present invention, there is provided a kit for treating retinitis pigmentosa in a subject, comprising an RNA molecule comprising a guide sequence portion having 17-20 nucleotides in the sequence of 17-20 contiguous nucleotides set forth in any one of SEQ ID NOs: 1-3010, a CRISPR nuclease, and/or a tracrRNA molecule; and instructions for delivering the RNA molecule; CRISPR nuclease, and/or the tracrRNA to a subject having or at risk of having retinitis pigmentosa.

### DETAILED DESCRIPTION

### Definitions

[0020] Unless otherwise defined, all technical and/or scientific terms used herein have the same meaning as commonly understood by one of ordinary skill in the art to which the invention pertains. Although methods and materials similar or equivalent to those described herein can be used in the practice or testing of embodiments of the invention, exemplary methods and/or materials are described below. In case of conflict, the patent specification, including definitions, will control. In addition, the materials, methods, and examples are illustrative only and are not intended to be necessarily limiting.

[0021] It should be understood that the terms “a” and “an” as used above and elsewhere herein refer to “one or more” of the enumerated components. It will be clear to one of ordinary skill in the art that the use of the singular includes the plural unless specifically stated otherwise. Therefore, the terms “a,” “an” and “at least one” are used interchangeably in this application.

[0022] For purposes of better understanding the present teachings and in no way limiting the scope of the teachings, unless otherwise indicated, all numbers expressing quantities, percentages or proportions, and other numerical values used in the specification and claims, are to be understood as being modified in all instances by the term “about.” Accordingly, unless indicated to the contrary, the numerical parameters set forth in the following specification and attached claims are approximations that may vary depending upon the desired properties sought to be obtained. At the very least, each numerical parameter should at least be construed in light of the number of reported significant digits and by applying ordinary rounding techniques.

[0023] Unless otherwise stated, adjectives such as “substantially” and “about” modifying a condition or relationship characteristic of a feature or features of an embodiment of the invention, are understood to mean that the condition or characteristic is defined to within tolerances that are acceptable for operation of the embodiment for an application for which it is intended. Unless otherwise indicated, the word “or” in the specification and claims is considered to be the inclusive “or” rather than the exclusive or, and indicates at least one of, or any combination of items it conjoins.

[0024] In the description and claims of the present application, each of the verbs, “comprise,” “include” and “have” and conjugates thereof, are used to indicate that the object or objects of the verb are not necessarily a complete listing of components, elements or parts of the subject or subjects of the verb. Other terms as used herein are meant to be defined by their well-known meanings in the art.

[0025] The “guide sequence portion” of an RNA molecule refers to a nucleotide sequence that is capable of hybridizing to a specific target DNA sequence, e.g., the guide sequence portion has a nucleotide sequence which is fully complementary to said target DNA sequence. In some embodiments, the guide sequence portion is 17, 18, 19, 20, 21, 22, 23, or 24 nucleotides in length, or approximately 17-24, 18-22, 19-22, 18-20, or 17-20 nucleotides in length. The guide sequence portion may be part of an RNA molecule that can form a complex with a CRISPR nuclease with the guide sequence portion serving as the DNA targeting portion of the CRISPR complex. When the DNA molecule having the guide sequence portion is present contemporaneously with the CRISPR molecule the RNA molecule is capable of targeting the CRISPR nuclease to the specific target DNA sequence. Each possibility represents a separate embodiment. An RNA molecule can be custom designed to target any desired sequence.

[0026] In embodiments of the present invention, an RNA molecule comprises a guide sequence portion having 17-20 nucleotides in the sequence of 17-20 contiguous nucleotides set forth in any one of SEQ ID NOs: 1-3010, 1-687, or 688-3010.

[0027] As used herein, “contiguous nucleotides” set forth in a SEQ ID NO refers to nucleotides in a sequence of nucleotides in the order set forth in the SEQ ID NO without any intervening nucleotides.

[0028] In embodiments of the present invention, the guide sequence portion may be 20 nucleotides in length and consists of 20 nucleotides in the sequence of 20 contiguous nucleotides set forth in any one of SEQ ID NOs: 1-3010. In embodiments of the present invention, the guide sequence portion may be less than 20 nucleotides in length. For example, in embodiments of the present invention the guide sequence portion may be 17, 18, or 19 nucleotides in length. In such embodiments the guide sequence portion may consist of 17, 18, or 19 nucleotides, respectively, in the sequence of 17-20 contiguous nucleotides set forth in any one of SEQ ID NOs: 1-3010. For example, a guide sequence portion having 17 nucleotides in the sequence of 17 contiguous nucleotides set forth in SEQ ID NO: 1 may consist of any one of the following nucleotide sequences (nucleotides excluded from the contiguous sequence are marked in strike-through):

SEQ ID NO: 1
AGGCUCCACUGAGAGGAAGG
17 nucleotide guide sequence 1: [symbol]
CUCCACUGAGAGGAAGG
17 nucleotide guide sequence 2: [symbol]
GCUCCACUGAGAGGAAG [symbol]
17 nucleotide guide sequence 3: [symbol]
GGCUCCACUGAGAGGAA [symbol]
17 nucleotide guide sequence 4:
AGGCUCCACUGAGAGGA

[symbol]

[0029] In embodiments of the present invention, the guide sequence portion may be greater than 20 nucleotides in length. For example, in embodiments of the present invention the guide sequence portion may be 21, 22, 23, or 24 nucleotides in length. In such embodiments the guide sequence portion comprises 20 nucleotides in the sequence of 20 contiguous nucleotides set forth in any one of SEQ ID NOs: 1-3010 and additional nucleotides fully complimentary to a nucleotide or sequence of nucleotides adjacent to the 3′ end of the target sequence, 5′ end of the target sequence, or both.

[0030] In embodiments of the present invention a CRISPR nuclease and an RNA molecule comprising a guide sequence portion form a CRISPR complex that binds to a target DNA sequence to effect cleavage of the target DNA sequence. CRISPR nucleases, e.g. Cpf1, may form a CRISPR complex comprising a CRISPR nuclease and RNA molecule without a further tracrRNA molecule. Alternatively, CRISPR nucleases, e.g. Cas9, may form a CRISPR complex between the CRISPR nuclease, an RNA molecule, and a tracrRNA molecule.

[0031] In embodiments of the present invention, the RNA molecule may further comprise the sequence of a tracrRNA molecule. Such embodiments may be designed as a synthetic fusion of the guide portion of the RNA molecule and the trans-activating crRNA (tracrRNA). (See Jinek (2012) Science). Embodiments of the present invention may also form CRISPR complexes utilizing a separate tracrRNA molecule and a separate RNA molecule comprising a guide sequence portion. In such embodiments the tracrRNA molecule may hybridize with the RNA molecule via basepairing and may be advantageous in certain applications of the invention described herein.

[0032] The term “tracr mate sequence” refers to a sequence sufficiently complementary to a tracrRNA molecule so as to hybridize to the tracrRNA via basepairing and promote the formation of a CRISPR complex. (See e.g., U.S. Pat. No. 8,906,616). In embodiments of the present invention, the RNA molecule may further comprise a portion having a tracr mate sequence.

[0033] A “gene,” for the purposes of the present disclosure, includes a DNA region encoding a gene product, as well as all DNA regions which regulate the production of the gene product, whether or not such regulatory sequences are adjacent to coding and/or transcribed sequences. Accordingly, a gene includes, but is not necessarily limited to, promoter sequences, terminators, translational regulatory sequences such as ribosome binding sites and internal ribosome entry sites, enhancers, silencers, insulators, boundary elements, replication origins, matrix attachment sites and locus control regions.

[0034] “Eukaryotic” cells include, but are not limited to, fungal cells (such as yeast), plant cells, animal cells, mammalian cells and human cells.

[0035] The term “nuclease” as used herein refers to an enzyme capable of cleaving the phosphodiester bonds between the nucleotide subunits of nucleic acid. A nuclease may be isolated or derived from a natural source. The natural source may be any living organism. Alternatively, a nuclease may be a modified or a synthetic protein which retains the phosphodiester bond cleaving activity. Gene modification can be achieved using a nuclease, for example a CRISPR nuclease.

### Embodiments

[0036] The present disclosure provides a method for utilizing at least one naturally occurring nucleotide difference or polymorphism (e.g., single nucleotide polymorphism (SNP)) for distinguishing/discriminating between two alleles of a gene, one allele bearing a mutation such that it encodes a mutated protein causing a disease phenotype (“mutated allele”), and the other allele encoding for a functional protein (“functional allele”). The method further comprises the step of knocking out expression of the mutated protein and allowing expression of the functional protein. In some embodiments, the method is for treating, ameliorating, or preventing a dominant negative genetic disorder.

[0037] According to embodiments of the present invention, there is provided a first RNA molecule comprising a guide sequence portion having 17-20 nucleotides in the sequence of 17-20 contiguous nucleotides set forth in any one of SEQ ID NOs: 1-3010.

[0038] According to embodiments of the present invention, there is provided a first RNA molecule comprising a guide sequence portion having 17-20 contiguous nucleotides set forth in any one of SEQ ID NOs: 1-3010.

[0039] According embodiments of the present invention, an RNA molecule may further comprise a portion having a sequence which binds to a CRISPR nuclease.

[0040] According to embodiments of the present invention, the sequence which binds to a CRISPR nuclease is a tracrRNA sequence.

[0041] According to embodiments of the present invention, an RNA molecule may further comprise a portion having a tracr mate sequence.

[0042] According to embodiments of the present invention, an RNA molecule may further comprise one or more linker portions.

[0043] According to embodiments of the present invention, an RNA molecule may be up to 300, 290, 280, 270, 260, 250, 240, 230, 220, 210, 200, 190, 180, 170, 160, 150, 140, 130, 120, 110, or 100 nucleotides in length. Each possibility represents a separate embodiment. In embodiments of the present invention, the RNA molecule may be 17 up to 300 nucleotides in length, 100 up to 300 nucleotides in length, 150 up to 300 nucleotides in length, 200 up to 300 nucleotides in length, 100 to 200 nucleotides in length, or 150 up to 250 nucleotides in length. Each possibility represents a separate embodiment.

[0044] According to some embodiments of the present invention, there is provided a composition comprising an RNA molecule comprising a guide sequence portion having 17-20 nucleotides in the sequence of 17-20 contiguous nucleotides set forth in any one of SEQ ID NOs: 1-3010 and a CRISPR nuclease.

[0045] According to embodiments of the present invention, the composition may comprise a second RNA molecule comprising a guide sequence portion.

[0046] According to embodiments of the present invention, the guide sequence portion of the second RNA molecule comprises 17-20 nucleotides in the sequence of 17-20 contiguous nucleotides set forth in any one of SEQ ID NOs: 1-3010.

[0047] According to embodiments of the present invention, the 17-20 nucleotides of the guide sequence portion of the second RNA molecule are in a different sequence from the sequence of the guide sequence portion of the first RNA molecule

[0048] Embodiments of the present invention may comprise a tracrRNA molecule.

[0049] According to some embodiments of the present invention, there is provided a method for inactivating a mutant IMDPH1 allele in a cell, the method comprising delivering to the cell a composition comprising an RNA molecule comprising a guide sequence portion having 17-20 nucleotides in the sequence of 17-20 contiguous nucleotides set forth in any one of SEQ ID NOs: 1-3010 and a CRISPR nuclease.

[0050] According to some embodiments of the present invention, there is provided a method for treating retinitis pigmentosa, the method comprising delivering to a subject having retinitis pigmentosa a composition comprising an RNA molecule comprising a guide sequence portion having 17-20 nucleotides in the sequence of 17-20 contiguous nucleotides set forth in any one of SEQ ID NOs: 1-3010 and a CRISPR nuclease.

[0051] According to embodiments of the present invention, the composition comprises a second RNA molecule comprising a guide sequence portion having 17-20 nucleotides in the sequence of 17-20 contiguous nucleotides set forth in any one of SEQ ID NOs: 1-3010.

[0052] According to embodiments of the present invention, the 17-20 nucleotides of the guide sequence portion of the second RNA molecule are in a different sequence from the sequence of the guide sequence portion of the first RNA molecule

[0053] According to embodiments of the present invention, the CRISPR nuclease and the RNA molecule or RNA molecules are delivered to the subject and/or cells substantially at the same time or at different times.

[0054] According to embodiments of the present invention, the tracrRNA is delivered to the subject and/or cells substantially at the same time or at different times as the CRISPR nuclease and RNA molecule or RNA molecules.

[0055] According to embodiments of the present invention, the first RNA molecule targets a SNP or disease-causing mutation in an exon or promoter of a mutated allele, and wherein the second RNA molecule targets a SNP in the same or a different exon of the mutated allele, a SNP in an intron, or a sequence in an intron present in both the mutated or functional allele.

[0056] According to embodiments of the present invention, the first RNA molecule or the first and the second RNA molecules target a SNP in the promoter region, the start codon, or the untranslated region (UTR) of a mutated allele.

[0057] According to embodiments of the present invention, the first RNA molecule or the first and the second RNA molecules targets at least a portion of the promoter and/or the start codon and/or a portion of the UTR of a mutated allele.

[0058] According to embodiments of the present invention, the first RNA molecule targets a portion of the promoter, a first SNP in the promoter, or a SNP upstream to the promoter of a mutated allele and the second RNA molecule is targets a second SNP, which is downstream of the first SNP, and is in the promoter, in the UTR, or in an intron or in an exon of a mutated allele.

[0059] According to embodiments of the present invention, the first RNA molecule targets a SNP in the promoter, upstream of the promoter, or the UTR of a mutated allele and the second RNA molecule is designed to target a sequence which is present in an intron of both the mutated allele and the functional allele.

[0060] According to embodiments of the present invention, the first RNA molecule targets a sequence upstream of the promotor which is present in both a mutated and functional allele and the second RNA molecule targets a SNP or disease-causing mutation in any location of the gene.

[0061] According to embodiments of the present invention, there is provided a method comprising removing an exon containing a disease-causing mutation from a mutated allele, wherein the first RNA molecule or the first and the second RNA molecules target regions flanking an entire exon or a portion of the exon.

[0062] According to embodiments of the present invention, there is provided a method comprising removing multiple exons, the entire open reading frame of a gene, or removing the entire gene.

[0063] According to embodiments of the present invention, the first RNA molecule targets a SNP or disease-causing mutation in an exon or promoter of a mutated allele, and wherein the second RNA molecule targets a SNP in the same or a different exon of the mutated allele, a SNP in an intron, or a sequence in an intron present in both the mutated or functional allele.

[0064] According to embodiments of the present invention, the first RNA molecule or the first and the second RNA molecules target an alternative splicing signal sequence between an exon and an intron of a mutant allele.

[0065] According to embodiments of the present invention, the second RNA molecule targets a sequence present in both a mutated allele and a functional allele.

[0066] According to embodiments of the present invention, the second RNA molecule targets an intron.

[0067] According to embodiments of the present invention, there is provided a method comprising subjecting the mutant allele to insertion or deletion by an error prone non-homologous end joining (NHEJ) mechanism, generating a frameshift in the mutated allele's sequence.

[0068] According to embodiments of the present invention, the frameshift results in inactivation or knockout of the mutated allele.

[0069] According to embodiments of the present invention, the frameshift creates an early stop codon in the mutated allele.

[0070] According to embodiments of the present invention, the frameshift results in nonsense-mediated mRNA decay of the transcript of the mutant allele.

[0071] According to embodiments of the present invention, the inactivating or treating results in a truncated protein encoded by the mutated allele and a functional protein encoded by the functional allele.

[0072] According to some embodiments of the present invention, there is provided use of a composition comprising an RNA molecule comprising a guide sequence portion having 17-20 nucleotides in the sequence of 17-20 contiguous nucleotides set forth in any one of SEQ ID NOs: 1-3010 and a CRISPR nuclease inactivating a mutant IMDPH1 allele in a cell, comprising delivering to the cell the RNA molecule comprising a guide sequence portion having 17-20 nucleotides in the sequence of 17-20 contiguous nucleotides set forth in any one of SEQ ID NOs: 1-3010 and the CRISPR nuclease.

[0073] According to embodiments of the present invention, there is provided a medicament comprising an RNA molecule comprising a guide sequence portion having 17-20 nucleotides in the sequence of 17-20 contiguous nucleotides set forth in any one of SEQ ID NOs: 1-3010 and a CRISPR nuclease for use in inactivating a mutant IMDPH1 allele in a cell, wherein the medicament is administered by delivering to the cell the composition comprising an RNA molecule comprising a guide sequence portion having 17-20 nucleotides in the sequence of 17-20 contiguous nucleotides set forth in any one of SEQ ID NOs: 1-3010 and a CRISPR nuclease.

[0074] According to some embodiments of the present invention, there is provided use of a composition comprising an RNA molecule comprising a guide sequence portion having 17-20 nucleotides in the sequence of 17-20 contiguous nucleotides set forth in any one of SEQ ID NOs: 1-3010 and a CRISPR nuclease for treating ameliorating or preventing retinitis pigmentosa, comprising delivering to a subject having or at risk of having retinitis pigmentosa the composition of comprising an RNA molecule comprising a guide sequence portion having 17-20 nucleotides in the sequence of 17-20 contiguous nucleotides set forth in any one of SEQ ID NOs: 1-3010 and a CRISPR nuclease.

[0075] According to some embodiments of the present invention, there is provided a medicament comprising the composition comprising an RNA molecule comprising a guide sequence portion having 17-20 nucleotides in the sequence of 17-20 contiguous nucleotides set forth in any one of SEQ ID NOs: 1-3010 and a CRISPR nuclease for use in treating ameliorating or preventing retinitis pigmentosa, wherein the medicament is administered by delivering to a subject having or at risk of having retinitis pigmentosa: the composition comprising an RNA molecule comprising a guide sequence portion having 17-20 nucleotides in the sequence of 17-20 contiguous nucleotides set forth in any one of SEQ ID NOs: 1-3010 and a CRISPR nuclease.

[0076] According to some embodiments of the present invention, there is provided a kit for inactivating a mutant IMDPH1 allele in a cell, comprising an RNA molecule comprising a guide sequence portion having 17-20 nucleotides in the sequence of 17-20 contiguous nucleotides set forth in any one of SEQ ID NOs: 1-3010, a CRISPR nuclease, and/or a tracrRNA molecule; and instructions for delivering the RNA molecule; CRISPR nuclease, and/or the tracrRNA to the cell.

[0077] According to some embodiments of the present invention, there is provided a kit for treating retinitis pigmentosa in a subject, comprising an RNA molecule comprising a guide sequence portion having 17-20 nucleotides in the sequence of 17-20 contiguous nucleotides set forth in any one of SEQ ID NOs: 1-3010, a CRISPR nuclease, and/or a tracrRNA molecule; and instructions for delivering the RNA molecule; CRISPR nuclease, and/or the tracrRNA to a subject having or at risk of having retinitis pigmentosa.

[0078] In embodiments of the present invention, the RNA molecule comprises a guide sequence portion having 17-20 nucleotides in the sequence of 17-20 contiguous nucleotides set forth in any one of SEQ ID NOs: 1-687, SEQ ID NOs: 688-3010, or SEQ ID NOs 1-3010.

[0079] The compositions and methods of the present disclosure may be utilized for treating, preventing, ameliorating, or slowing progression of retinitis pigmentosa. In some embodiments the retinitis pigmentosa is type 10 (RP10).

[0080] In some embodiments, a mutated allele is deactivated by delivering to a cell an RNA molecule which targets a SNP in the promoter region, the start codon, or the untranslated region (UTR) of the mutated allele.

[0081] In some embodiments, a mutated allele is inactivated by removing at least a portion of the promoter and/or removing the start codon and/or a portion of the UTR. In some embodiments, the method of deactivating a mutated allele comprises removing at least a portion of the promoter. In such embodiments one RNA molecule may be designed for targeting a first SNP in the promoter or upstream to the promoter and another RNA molecule is designed to target a second SNP, which is downstream of the first SNP, and is in the promoter, in the UTR, or in an intron or in an exon. Alternatively, one RNA molecule may be designed for targeting a SNP in the promoter, or upstream of the promoter, or the UTR and another RNA molecule is designed to target a sequence which is present in an intron of both the mutated allele and the functional allele. Alternatively, one RNA molecule may be designed for targeting a sequence upstream of the promotor which is present in both the mutated and functional allele and the other guide is designed to target a SNP or disease-causing mutation in any location of the gene e.g., in an exon, intron, UTR, or downstream of the promoter.

[0082] In some embodiments, the method of deactivating a mutated allele comprises an exon skipping step comprising removing an exon containing a disease-causing mutation from the mutated allele. Removing an exon containing a disease-causing mutation in the mutated allele requires two RNA molecules which target regions flanking the entire exon or a portion of the exon. Removal of an exon containing the disease-causing mutation may be designed to eliminate the disease-causing action of the protein while allowing for expression of the remaining protein product which retains some or all of the wild-type activity. As an alternative to single exon skipping, multiple exons, the entire open reading frame or the entire gene can be excised using two RNA molecules flanking the region desired to be excised.

[0083] In some embodiments, the method of deactivating a mutated allele comprises delivering two RNA molecules to a cell, wherein one RNA molecule targets a SNP or disease-causing mutation in an exon or promoter of the mutated allele, and wherein the other RNA molecule targets a SNP in the same or a different exon of the mutated allele, a SNP in an intron, or a sequence in an intron present in both the mutated or functional allele.

[0084] In some embodiments, an RNA molecule is used to target a CRISPR nuclease to an alternative splicing signal sequence between an exon and an intron of a mutant allele, thereby destroying the alternative splicing signal sequence in the mutant allele.

[0085] Any one of, or combination of, the above-mentioned strategies for deactivating a mutant allele may be used in the context of the invention.

[0086] Additional strategies may be used to deactivate a mutated allele. For example, in embodiments of the present invention, an RNA molecule is used to direct a CRISPR nuclease to an exon or a splice site of a mutated allele in order to create a double-stranded break (DSB), leading to insertion or deletion of nucleotides by an error-prone non-homologous end-joining (NHEJ) mechanism and formation of a frameshift mutation in the mutated allele. The frameshift mutation may result in: (1) inactivation or knockout of the mutated allele by generation of an early stop codon in the mutated allele, resulting in generation of a truncated protein; or (2) nonsense mediated mRNA decay of the transcript of the mutant allele. In further embodiments, one RNA molecule is used to direct a CRISPR nuclease to a promotor of a mutated allele.

[0087] In some embodiments, the method of deactivating a mutated allele further comprises enhancing activity of the functional protein such as by providing a protein/peptide, a nucleic acid encoding a protein/peptide, or a small molecule such as a chemical compound, capable of activating/enhancing activity of the functional protein.

[0088] According to some embodiments, the present disclosure provides an RNA sequence (‘RNA molecule’) which binds to/associates with and/or directs the RNA guided DNA nuclease e.g., CRISPR nuclease to a sequence comprising at least one nucleotide which differs between a mutated allele and a functional allele (e.g., SNP) of a gene of interest (i.e., a sequence of the mutated allele which is not present in the functional allele).

[0089] In some embodiments, the method comprises the steps of: contacting a mutated allele of a gene of interest with an allele-specific RNA molecule and a CRISPR nuclease e.g., a Cas9 protein, wherein the allele-specific RNA molecule and the CRISPR nuclease e.g., Cas9 associate with a nucleotide sequence of the mutated allele of the gene of interest which differs by at least one nucleotide from a nucleotide sequence of a functional allele of the gene of interest, thereby modifying or knocking-out the mutated allele.

[0090] In some embodiments, the allele-specific RNA molecule and a CRISPR nuclease is introduced to a cell encoding the gene of interest. In some embodiments, the cell encoding the gene of interest is in a mammalian subject. In some embodiments, the cell encoding the gene of interest is in a plant.

[0091] In some embodiments, the cleaved mutated allele is further subjected to insertion or deletion (indel) by an error prone non-homologous end joining (NHEJ) mechanism, generating a frameshift in the mutated allele's sequence. In some embodiments, the generated frameshift results in inactivation or knockout of the mutated allele. In some embodiments, the generated frameshift creates an early stop codon in the mutated allele and results in generation of a truncated protein. In such embodiments, the method results in the generation of a truncated protein encoded by the mutated allele and a functional protein encoded by the functional allele. In some embodiments, a frameshift generated in a mutated allele using the methods of the invention results in nonsense-mediated mRNA decay of the transcript of the mutant allele.

[0092] In some embodiments, the mutated allele is an allele of the IMDPH1 gene. In some embodiments, the RNA molecule targets a SNP which co-exists with/is genetically linked to the mutated sequence associated with retinitis pigmentosa genetic disorder. In some embodiments, the RNA molecule targets a SNP which is highly prevalent in the population and exists in the mutated allele having the mutated sequence associated with retinitis pigmentosa genetic disorder and not in the functional allele of an individual subject to be treated. In some embodiments, a disease-causing mutation within a mutated IMDPH1 allele is targeted.

[0093] In some embodiments, the SNP is within an exon of the gene of interest. In such embodiments, a guide sequence portion of an RNA molecule may be designed to associate with a sequence of the exon of the gene of interest.

[0094] In some embodiments, SNP is within an intron or an exon of the gene of interest. In some embodiments, SNP is in close proximity to a splice site between the intron and the exon. In some embodiments, the close proximity to a splice site is 1, 2, 3, 4, 5, 6, 7, 8, 9, 10, 11, 12, 13, 14, 15, 16, 17, 18, 19, or 20 nucleotides upstream or downstream to the splice site. Each possibility represents a separate embodiment of the present invention. In such embodiments, a guide sequence portion of an RNA molecule may be designed to associate with a sequence of the gene of interest which comprises the splice site.

[0095] In some embodiments, the method is utilized for treating a subject having a disease phenotype resulting from the heterozygote 1MDPH1 gene. In such embodiments, the method results in improvement, amelioration or prevention of the disease phenotype.

[0096] Embodiments referred to above refer to a CRISPR nuclease, RNA molecule(s), and tracrRNA being effective in a subject or cells at the same time. The CRISPR, RNA molecule(s), and tracrRNA can be delivered substantially at the same time or can be delivered at different times but have effect at the same time. For example, this includes delivering the CRISPR nuclease to the subject or cells before the RNA molecule and/or tracr RNA is substantially extant in the subject or cells.

[0097] In some embodiments, the cell is a retinal cell. In some embodiments, the cell is a photoreceptor cell. In some embodiments, the photoreceptor cell is a rod photoreceptor cell. In some embodiments, the photoreceptor cell is a cone photoreceptor cell.

### Dominant Genetic Disorders.

[0098] One of skill in the art will appreciate that all subjects with any type of heterozygote genetic disorder (e.g., dominant genetic disorder) may be subjected to the methods described herein. In one embodiment, the present invention may be used to target a gene involved in, associated with, or causative of dominant genetic disorders such as, for example retinitis pigmentosa. In some embodiments, the dominant genetic disorder is retinitis pigmentosa. In some embodiments, the target gene is the IMPDH1 gene (Entrez Gene, gene ID No: 3614).

### CRISPR Nucleases and PAM Recognition

[0099] In some embodiments, the sequence specific nuclease is selected from CRISPR nucleases, or a functional variant thereof. In some embodiments, the sequence specific nuclease is an RNA guided DNA nuclease. In such embodiments, the RNA sequence which guides the RNA guided DNA nuclease (e.g., Cpf1) binds to and/or directs the RNA guided DNA nuclease to the sequence comprising at least one nucleotide which differs between a mutated allele and its counterpart functional allele (e.g., SNP). In some embodiments, the CRISPR complex does not further comprise a tracrRNA. In a non-limiting example, in which the RNA guided DNA nuclease is a CRISPR protein, the at least one nucleotide which differs between the dominant mutated allele and the functional allele may be within the PAM site and/or proximal to the PAM site within the region that the RNA molecule is designed to hybridize to. A skilled artisan will appreciate that RNA molecules can be engineered to bind to a target of choice in a genome by commonly known methods in the art.

[0100] In embodiments of the present invention, a type II CRISPR system utilizes a mature crRNA:tracrRNA complex directs a CRISPR nuclease, e.g. Cas9, to the target DNA via Watson-Crick base-pairing between the crRNA and the protospacer on the target DNA next to the protospacer adjacent motif (PAM), an additional requirement for target recognition. The CRISPR nuclease then mediates cleavage of target DNA to create a double-stranded break within the protospacer. A skilled artisan will appreciate that each of the engineered RNA molecule of the present invention is further designed such as to associate with a target genomic DNA sequence of interest next to a protospacer adjacent motif (PAM), e.g., a PAM matching the sequence relevant for the type of CRISPR nuclease utilized, such as for a non-limiting example, NGG or NAG, wherein “N” is any nucleobase, for Streptococcus pyogenes Cas9 WT (SpCAS9); NNGRRT for Staphylococcus aureus (SaCas9); NNNVRYM for Jejuni Cas9 WT; NGAN or NGNG for SpCas9-VQR variant; NGCG for SpCas9-VRER variant; NGAG for SpCas9-EQR variant; NNNNGATT for Neisseria meningitidis (NmCas9); or TTTV for Cpf1. RNA molecules of the present invention are each designed to form complexes in conjunction with one or more different CRISPR nucleases and designed to target polynucleotide sequences of interest utilizing one or more different PAM sequences respective to the CRISPR nuclease utilized.

[0101] In some embodiments, an RNA-guided DNA nuclease e.g., a CRISPR nuclease, may be used to cause a DNA break at a desired location in the genome of a cell. The most commonly used RNA-guided DNA nucleases are derived from CRISPR systems, however, other RNA-guided DNA nucleases are also contemplated for use in the genome editing compositions and methods described herein. For instance, see U.S. Patent Publication No. 2015-0211023, incorporated herein by reference.

[0102] CRISPR systems that may be used in the practice of the invention vary greatly. CRISPR systems can be a type I, a type II, or a type III system. Non-limiting examples of suitable CRISPR proteins include Cas3, Cas4, Cas5, Cas5e (or CasD), Cas6, Cas6e, Cas6f, Cas7, Cas8a1, Cas8a2, Cas8b, Cas8c, Cas9, Cas10, Cas10d, CasF, CasG, CasH, Csy1, Csy2, Csy3, Cse1 (or CasA), Cse2 (or CasB), Cse3 (or CasE), Cse4 (or CasC), Csc1, Csc2, Csa5, Csn2, Csm2, Csm3, Csm4, Csm5, Csm6, Cmr1, Cmr3, Cmr4, Cmr5, Cmr6, Csb1, Csb2, Csb3,Csx17, Csx14, Csx10, Csx16, CsaX, Csx3, Csz1, Csx15, Csf1, Csf2, Csf3, Csf4, and Cul966.

[0103] In some embodiments, the RNA-guided DNA nuclease is a CRISPR nuclease derived from a type II CRISPR system (e.g., Cas9). The CRISPR nuclease may be derived from Streptococcus pyogenes, Streptococcus thermophilus, Streptococcus sp., Staphylococcus aureus, Neisseria meningitidis, Treponema denticola, Nocardiopsis dassonvillei, Streptomyces pristinaespiralis, Streptomyces viridochromogenes, Streptomyces viridochromogenes, Streptosporangium roseum, Streptosporangium roseum, Alicyclobacillus acidocaldarius, Bacillus pseudomycoides, Bacillus selenitireducens, Exiguobacterium sibiricum, Lactobacillus delbrueckii, Lactobacillus salivarius, Microscilla marina, Burkholderiales bacterium, Polaromonas naphthalenivorans, Polaromonas sp., Crocosphaera watsonii, Cyanothece sp., Microcystis aeruginosa, Synechococcus sp., Acetohalobium arabaticum, Ammonifex degensii, Caldicelulosiruptor becscii, Candidatus Desulforudis, Clostridium botulinum, Clostridium diljicile, Finegoldia magna, Natranaerobius thermophilus, Pelotomaculum thermopropionicum, Acidithiobacillus caldus, Acidithiobacillus ferrooxidans, Allochromatium vinosum, Marinobacter sp., Nitrosococcus halophilus, Nitrosococcus watsoni, Pseudoalteromonas haloplanktis, Ktedonobacter racemifer, Methanohalobium evestigatum, Anabaena variabilis, Nodularia spumigena, Nostoc sp., Arthrospira maxima, Arthrospira platensis, Arthrospira sp., Lyngbya sp., Microcoleus chthonoplastes, Oscillatoria sp., Petrotoga mobilis, Thermosipho africanus, Acaryochloris marina, or any species which encodes a CRISPR nuclease with a known PAM sequence. CRISPR nucleases encoded by uncultured bacteria may also be used in the context of the invention. (See Burstein et al. Nature, 2017). Variants of CRIPSR proteins having known PAM sequences e.g., spCas9 D1135E variant, spCas9 VQR variant, spCas9 EQR variant, or spCas9 VRER variant may also be used in the context of the invention.

[0104] Thus, an RNA guided DNA nuclease of a CRISPR system, such as a Cas9 protein or modified Cas9 or homolog or ortholog of Cas9, or other RNA guided DNA nucleases belonging to other types of CRISPR systems, such as Cpf1 and its homologs and orthologs, may be used in the compositions of the present invention.

[0105] In certain embodiments, the CRIPSR nuclease may be a “functional derivative” of a naturally occurring Cas protein. A “functional derivative” of a native sequence polypeptide is a compound having a qualitative biological property in common with a native sequence polypeptide. “Functional derivatives” include, but are not limited to, fragments of a native sequence and derivatives of a native sequence polypeptide and its fragments, provided that they have a biological activity in common with a corresponding native sequence polypeptide. A biological activity contemplated herein is the ability of the functional derivative to hydrolyze a DNA substrate into fragments. The term “derivative” encompasses both amino acid sequence variants of polypeptide, covalent modifications, and fusions thereof. Suitable derivatives of a Cas polypeptide or a fragment thereof include but are not limited to mutants, fusions, covalent modifications of Cas protein or a fragment thereof. Cas protein, which includes Cas protein or a fragment thereof, as well as derivatives of Cas protein or a fragment thereof, may be obtainable from a cell or synthesized chemically or by a combination of these two procedures. The cell may be a cell that naturally produces Cas protein, or a cell that naturally produces Cas protein and is genetically engineered to produce the endogenous Cas protein at a higher expression level or to produce a Cas protein from an exogenously introduced nucleic acid, which nucleic acid encodes a Cas that is same or different from the endogenous Cas. In some cases, the cell does not naturally produce Cas protein and is genetically engineered to produce a Cas protein.

[0106] In some embodiments, the CRISPR nuclease is Cpf1. Cpf1 is a single RNA-guided endonuclease which utilizes a T-rich protospacer-adjacent motif. Cpf1 cleaves DNA via a staggered DNA double-stranded break. Two Cpf1 enzymes from Acidaminococcus and Lachnospiraceae have been shown to carry out efficient genome-editing activity in human cells. (See Zetsche et al. (2015) Cell.).

[0107] Thus, an RNA guided DNA nuclease of a Type II CRISPR System, such as a Cas9 protein or modified Cas9 or homologs, orthologues, or variants of Cas9, or other RNA guided DNA nucleases belonging to other types of CRISPR systems, such as Cpf1 and its homologs, orthologues, or variants, may be used in the present invention.

[0108] In some embodiments, the guide molecule comprises one or more chemical modifications which imparts a new or improved property (e.g., improved stability from degradation, improved hybridization energetics, or improved binding properties with an RNA guided DNA nuclease). Suitable chemical modifications include, but are not limited to: modified bases, modified sugar moieties, or modified inter-nucleoside linkages. Non-limiting examples of suitable chemical modifications include: 4-acetylcytidine, 5-(carboxyhydroxymethyl)uridine, 2′-O-methylcytidine, 5-carboxymethylaminomethyl-2-thiouridine, 5-carboxymethylaminomethyluridine, dihydrouridine, 2′-O-methylpseudouridine, “beta, D-galactosylqueuosine”, 2′-O-methylguanosine, inosine, N6-isopentenyladenosine, 1-methyladenosine, 1-methylpseudouridine, 1-methylguanosine, 1-methylinosine, “2,2-dimethylguanosine”, 2-methyladenosine, 2-methylguanosine, 3-methylcytidine, 5-methylcytidine, N6-methyladenosine, 7-methylguanosine, 5-methylaminomethyluridine, 5-methoxyaminomethyl-2-thiouridine, “beta, D-mannosylqueuosine”, 5-methoxycarbonylmethyl-2-thiouridine, 5-methoxycarbonylmethyluridine, 5-methoxyuridine, 2-methylthio-N6-isopentenyladenosine, N-((9-beta-D-ribofuranosyl-2-methylthiopurine-6-yl)carbamoyl)threonine, N-((9-beta-D-ribofuranosylpurine-6-yl)N-methylcarbamoyl)threonine, uridine-5-oxyacetic acid-methylester, uridine-5-oxyacetic acid, wybutoxosine, queuosine, 2-thiocytidine, 5-methyl-2-thiouridine, 2-thiouridine, 4-thiouridine, 5-methyluridine, N-((9-beta-D-ribofuranosylpurine-6-yl)-carbamoyl)threonine, 2′-O-methyl-5-methyluridine, 2′-O-methyluridine, wybutosine, “3-(3-amino-3-carboxy-propyl)uridine, (acp3)u”, 2′-0-methyl (M), 3′-phosphorothioate (MS), 3′-thioPACE (MSP), pseudouridine, or 1-methyl pseudo-uridine. Each possibility represents a separate embodiment of the present invention.

Guide Sequences which Specifically Target a Mutant Allele

[0109] A given gene may contain thousands of SNPs. Utilizing a 24 base pair target window for targeting each SNP in a gene would require hundreds of thousands of guide sequences. Any given guide sequence when utilized to target a SNP may result in degradation of the guide sequence, limited activity, no activity, or off-target effects. Accordingly, suitable guide sequences are necessary for targeting a given gene. By the present invention, a novel set of guide sequences have been identified for knocking out expression of a mutated IMDPH1 protein, inactivating a mutant IMDPH1 gene allele, and treating retinitis pigmentosa.

[0110] The present disclosure provides guide sequences capable of specifically targeting a mutated allele for inactivation while leaving the functional allele unmodified. The guide sequences of the present invention are designed to, and are most likely to, specifically differentiate between a mutated allele and a functional allele. Of all possible guide sequences which target a mutated allele desired to be inactivated, the specific guide sequences disclosed herein are specifically effective to function with the disclosed embodiments.

[0111] Briefly, the guide sequences may have properties as follows: (1) target SNP/insertion/deletion/indel with a high prevalence in the general population, in a specific ethnic population or in a patient population is above 1% and the SNP/insertion/deletion/indel heterozygosity rate in the same population is above 1%; (2) target a location of a SNP/insertion/deletion/indel proximal to a portion of the gene e.g., within 5k bases of any portion of the gene, for example, a promoter, a UTR, an exon or an intron; and (3) target a mutant allele using an RNA molecule which targets a founder or common pathogenic mutations for the disease/gene. In some embodiments, the prevalence of the SNP/insertion/deletion/indel in the general population, in a specific ethnic population or in a patient population is above 1%, 2%, 3%, 4%, 5%, 6%, 7%, 8%, 9%, 10%, 11%, 12%, 13%, 14%, or 15% and the SNP/insertion/deletion/indel heterozygosity rate in the same population is above 1%, 2%, 3%, 4%, 5%, 6%, 7%, 8%, 9%, 10%, 11%, 12%, 13%, 14%, or 15%. Each possibility represents a separate embodiment and may be combined at will.

[0112] For each gene, according to SNP/insertion/deletion/indel any one of the following strategies may be used to deactivate the mutated allele: (1) Knockout strategy using one RNA molecule—one RNA molecule is utilized to direct a CRISPR nuclease to a mutated allele and create a double-strand break (DSB) leading to formation of a frameshift mutation in an exon or in a splice site region of the mutated allele; (2) Knockout strategy using two RNA molecules—two RNA molecules are utilized. A first RNA molecule targets a region in the promoter or an upstream region of a mutated allele and another RNA molecule targets downstream of the first RNA molecule in a promoter, exon, or intron of the mutated allele; (3) Exon(s) skipping strategy—one RNA molecule may be used to target a CRISPR nuclease to a splice site region, either at the 5′ end of an intron (donor sequence) or the 3′ end of an intron (acceptor sequence), in order to destroy the splice site. Alternatively, two RNA molecules may be utilized such that a first RNA molecule targets an upstream region of an exon and a second RNA molecule targets a region downstream of the first RNA molecule, thereby excising the exon(s). Based on the locations of identified SNPs/insertions/deletions/indels for each mutant allele, any one of, or a combination of, the above-mentioned methods to deactivate the mutant allele may be utilized.

[0113] When only one RNA molecule is used is that the location of the SNP is in an exon or in close proximity (e.g., within 20 basepairs) to a splice site between the intron and the exon. When two RNA molecules are used, guide sequences may target two SNPs such that the first SNP is upstream of exon 1 e.g., within the 5′ untranslated region, or within the promoter or within the first 2 kilobases 5′ of the transcription start site, and the second SNP is downstream of the first SNP e.g., within the first 2 kilobases 5′ of the transcription start site, or within intron 1, 2 or 3, or within exon 1, exon 2, or exon 3.

[0114] Guide sequences of the present invention may target a SNP in the upstream portion of the targeted gene, preferably upstream of the last exon of the targeted gene. Guide sequences may target a SNP upstream to exon 1, for example within the 5′ untranslated region, or within the promoter or within the first 4-5 kilobases 5′ of the transcription start site.

[0115] Guide sequences of the present invention may also target a SNP within close proximity (e.g., within 50 basepairs, more preferably with 20 basepairs) to a known protospacer adjacent motif (PAM) site.

[0116] Guide sequences of the present invention also may target: (1) a heterozygous SNP for the targeted gene; (2) a heterozygous SNPs upstream and downstream of the gene; (3) a SNPs with a prevalence of the SNP/insertion/deletion/indel in the general population, in a specific ethnic population, or in a patient population above 1%; (4) have a guanine-cytosine content of greater than 30% and less than 85%; (5) have no repeat of 4 or more thymine/uracil or 8 or more guanine, cytosine, or adenine; (6) having no off-target identified by off-target analysis; and (7) preferably target Exons over Introns or be upstream of a SNP rather than downstream of a SNP.

[0117] In embodiments of the present invention, the SNP may be upstream or downstream of the gene. In embodiments of the present invention, the SNP is within 4,000 base pairs upstream or downstream of the gene.

[0118] The at least one nucleotide which differs between the mutated allele and the functional allele, may be upstream, downstream or within the sequence of the disease-causing mutation of the gene of interest. The at least one nucleotide which differs between the mutated allele and the functional allele, may be within an exon or within an intron of the gene of interest. In some embodiments, the at least one nucleotide which differs between the mutated allele and the functional allele is within an exon of the gene of interest. In some embodiments, the at least one nucleotide which differs between the mutated allele and the functional allele is within an intron or an exon of the gene of interest, in close proximity to a splice site between the intron and the exon e.g., 1, 2, 3, 4, 5, 6, 7, 8, 9, 10, 11, 12, 13, 14, 15, 16, 17, 18, 19, or 20 nucleotides upstream or downstream to the splice site.

[0119] In some embodiments, the at least one nucleotide is a single nucleotide polymorphisms (SNPs). In some embodiments, each of the nucleotide variants of the SNP may be expressed in the mutated allele. In some embodiments, the SNP may be a founder or common pathogenic mutation.

[0120] Guide sequences may target a SNP which has both (1) a high prevalence in the general population e.g., above 1% in the population; and (2) a high heterozygosity rate in the population, e.g., above 1%. Guide sequences may target a SNP that is globally distributed. A SNP may be a founder or common pathogenic mutation. In some embodiments, the prevalence in the general population is above 1%, 2%, 3%, 4%, 5%, 6%, 7%, 8%, 9%, 10%, 11%, 12%, 13%, 14%, or 15%. Each possibility represents a separate embodiment. In some embodiments, the heterozygosity rate in the population is above 1%, 2%, 3%, 4%, 5%, 6%, 7%, 8%, 9%, 10%, 11%, 12%, 13%, 14%, or 15%. Each possibility represents a separate embodiment.

[0121] In some embodiments, the at least one nucleotide which differs between the mutated allele and the functional allele is linked to/co-exists with the disease-causing mutation in high prevalence in a population. In such embodiments, “high prevalence” refers to at least 92%, 93%, 94%, 95%, 96%, 97%, 98%, 99%, or 100%. Each possibility represents a separate embodiment of the present invention. In one embodiment, the at least one nucleotide which differs between the mutated allele and the functional allele, is a disease-associated mutation. In some embodiments, the SNP is highly prevalent in the population. In such embodiments, “highly prevalent” refers to at least 10%, 11%, 12%, 13%, 14%, 15%, 20%, 30%, 40%, 50%, 60%, or 70% of a population. Each possibility represents a separate embodiment of the present invention.

[0122] Guide sequences of the present invention may satisfy any one of the above criteria and are most likely to differentiate between a mutated allele from its corresponding functional allele.

[0123] In some embodiments the RNA molecule targets a SNP/WT sequence linked to SNPs as shown in Table 1 below. The SNP details are indicated in the 1^{st} column and include: SNP ID No. (based on NCBI's 2018 database of Single Nucleotide Polymorphisms (dbSNP)). For variants with no available rs number variants characteristic are indicated based on gnomAD 2018 browser database. The 2^{nd} column indicates an assigned identifier for each SNP. The 3^{rd} column indicates the location of each SNP on the IMDPH1 gene.

TABLE 1
IMDPH1 gene SNPs

| RSID | SNP No. | SNP location in the gene |
|---|---|---|
| rs2278293 | s1 | Intron_7 of 16 |
| rs2278294 | s2 | Intron_7 of 16 |
| rs10954183 | s3 | Intron_9 of 16 |
| rs10954184 | s4 | Intron_9 of 16 |
| rs7802305 | s5 | Intron_10 of 16 |
| rs72624976 | s6 | Exon_17 of 17 |
| rs34848853 | s7 | Intron_3 of 16 |
| rs13312278 | s8 | Intron_5 of 16 |
| rs13242340 | s9 | Intron_3 of 16 |
| rs3793165 | s10 | Intron_5 of 16 |
| rs11770116 | s11 | Intron_3 of 16 |
| rs12536006 | s12 | Intron_3 of 16 |
| rs2228075 | s13 | Exon_15 of 17 |
| rs6949295 | s14 | downstream +4000 bp |
| rs4731450 | s15 | Intron_5 of 16 |
| rs6948333 | s16 | downstream +574 bp |
| rs2288548 | s17 | Intron_4 of 16 |
| rs4731448 | s18 | Intron_5 of 16 |
| rs2288549 | s19 | Intron_4 of 16 |
| rs714510 | s20 | downstream +1032 bp |
| rs11764599 | s21 | upstream −3349 bp |
| rs11766743 | s22 | Intron_12 of 16 |
| rs3793164 | s23 | Intron_5 of 16 |
| rs2288550 | s24 | Exon_10 of 17 |
| rs72624936 | s25 | Exon_1 of 17 |
| rs11771514 | s26 | upstream −3603 bp |
| rs57124454 | s27 | upstream −1986 bp |
| rs35501542 | s28 | Intron_5 of 16 |
| rs62481103 | s29 | Intron_4 of 16 |
| rs62481100 | s30 | Intron_5 of 16 |
| rs72624928 | s31 | upstream −670 bp |
| rs76672854 | s32 | Intron_4 of 16 |
| rs28580600 | s33 | Intron_13 of 16 |
| rs10247945 | s34 | Intron_5 of 16 |
| rs714511 | s35 | downstream +716 bp |
| rs4731449 | s36 | Intron_5 of 16 |
| rs571143742 | s37 | Intron_3 of 16 |
| rs78763502 | s38 | Intron_16 of 16 |
| rs10273872 | s39 | Intron_16 of 16 |
| rs11761662 | s40 | upstream −381 bp |
| rs11771484 | s41 | upstream −3309 bp |
| rs76951139 | s42 | Intron_5 of 16 |
| rs11769333 | s43 | Intron_3 of 16 |
| rs144398561 | s44 | Intron_3 of 16 |
| rs66511422 | s45 | Intron_3 of 16 |
| rs11766548 | s46 | Intron_3 of 16 |
| rs4731447 | s47 | Intron_14 of 16 |
| rs2288553 | s48 | Intron_1 of 16 |
| rs1803821 | s49 | Exon_17 of 17 |
| rs1803822 | s50 | Exon_17 of 17 |
| rs28364722 | s51 | Intron_3 of 16 |

### Delivery to Cells

[0124] The RNA molecule compositions described herein may be delivered to a target cell by any suitable means. RNA molecule compositions of the present invention may be targeted to any cell which contains and/or expresses a dominant negative allele, including any mammalian or plant cell. For example, in one embodiment the RNA molecule specifically targets a mutated IMDPH1 allele and the target cell is a retinal cell such as pigment epithelium (RPE), photoreceptors (e.g., rod and cone), glial cells (e.g., Müller), and ganglion cells. Further, the nucleic acid compositions described herein may be delivered as one or more DNA molecules, RNA molecules, Ribonucleoproteins (RNP), nucleic acid vectors, or any combination thereof.

[0125] In some embodiments, the RNA molecule comprises a chemical modification. Non-limiting examples of suitable chemical modifications include 2′-0-methyl (M), 2′-0-methyl, 3′phosplaorothioate (MS) or 2′-0-methyl, 3′thioPACE (MSP), pseudouridine, and 1-methyl pseudo-uridine. Each possibility represents a separate embodiment of the present invention.

[0126] Any suitable viral vector system may be used to deliver nucleic acid compositions e.g., the RNA molecule compositions of the subject invention. Conventional viral and non-viral based gene transfer methods can be used to introduce nucleic acids and target tissues. In certain embodiments, nucleic acids are administered for in vivo or ex vivo gene therapy uses. Non-viral vector delivery systems include naked nucleic acid, and nucleic acid complexed with a delivery vehicle such as a liposome or poloxamer. For a review of gene therapy procedures, see Anderson (1992) Science 256:808-813; Nabel & Felgner (1993) TIBTECH 11:211-217; Mitani & Caskey (1993) TIBTECH 11:162-166; Dillon (1993) TIBTECH 11:167-175; Miller (1992) Nature 357:455-460; Van Brunt (1988) Biotechnology 6(10):1149-1154; Vigne (1995) Restorative Neurology and Neuroscience 8:35-36; Kremer & Perricaudet (1995) British Medical Bulletin 51(1):31-44; Haddada et al. (1995) in Current Topics in Microbiology and Immunology Doerfler and Bohm (eds.); and Yu et al. (1994) Gene Therapy 1:13-26.

[0127] Methods of non-viral delivery of nucleic acids and/or proteins include electroporation, lipofection, microinjection, biolistics, particle gun acceleration, virosomes, liposomes, immunoliposomes, lipid nanoparticles (LNPs), polycation or lipid:nucleic acid conjugates, artificial virions, and agent-enhanced uptake of nucleic acids or can be delivered to plant cells by bacteria or viruses (e.g., Agrobacterium, Rhizobium sp. NGR234, Sinorhizoboiummeliloti, Mesorhizobium loti, tobacco mosaic virus, potato virus X, cauliflower mosaic virus and cassava vein mosaic virus). (See, e.g., Chung et al. (2006) Trends Plant Sci. 11(1):1-4). Sonoporation using, e.g., the Sonitron 2000 system (Rich-Mar), can also be used for delivery of nucleic acids. Cationic-lipid mediated delivery of proteins and/or nucleic acids is also contemplated as an in vivo or in vitro delivery method. (See Zuris et al. (2015) Nat. Biotechnol. 33(1):73-80; see also Coelho et al. (2013) N. Engl. J. Med. 369, 819-829; Judge et al. (2006) Mol. Ther. 13, 494-505; and Basha et al. (2011) Mol. Ther. 19, 2186-2200).

[0128] Additional exemplary nucleic acid delivery systems include those provided by Amaxa® Biosystems (Cologne, Germany), Maxcyte, Inc. (Rockville, Md.), BTX Molecular Delivery Systems (Holliston, Mass.) and Copernicus Therapeutics Inc., (see, e.g., U.S. Pat. No. 6,008,336). Lipofection is described in e.g., U.S. Pat. Nos. 5,049,386, 4,946,787; and 4,897,355, and lipofection reagents are sold commercially (e.g., Transfectam™, Lipofectin™ and Lipofectamine™ RNAiMAX). Cationic and neutral lipids that are suitable for efficient receptor-recognition lipofection of polynucleotides include those of Felgner, WO 91/17424, WO 91/16024. Delivery can be to cells (ex vivo administration) or target tissues (in vivo administration).

[0129] The preparation of lipid:nucleic acid complexes, including targeted liposomes such as immunolipid complexes, is well known to one of skill in the art (See, e.g., Crystal (1995) Science 270:404-410; Blaese et al. (1995) Cancer Gene Ther. 2:291-297; Behr et al. (1994) Bioconjugate Chem. 5:382-389; Remy et al. (1994) Bioconjugate Chem. 5:647-654; Gao et al. (1995) Gene Therapy 2:710-722; Ahmad et al. (1992) Cancer Res. 52:4817-4820; U.S. Pat. Nos. 4,186,183, 4,217,344, 4,235,871, 4,261,975, 4,485,054, 4,501,728, 4,774,085, 4,837,028, and 4,946,787).

[0130] Additional methods of delivery include the use of packaging the nucleic acids to be delivered into EnGenelC delivery vehicles (EDVs). These EDVs are specifically delivered to target tissues using bispecific antibodies where one arm of the antibody has specificity for the target tissue and the other has specificity for the EDV. The antibody brings the EDVs to the target cell surface and then the EDV is brought into the cell by endocytosis. Once in the cell, the contents are released (See MacDiarmid et al (2009) Nature Biotechnology 27(7):643).

[0131] The use of RNA or DNA viral based systems for viral mediated delivery of nucleic acids take advantage of highly evolved processes for targeting a virus to specific cells in the body and trafficking the viral payload to the nucleus. Viral vectors can be administered directly to patients (in vivo) or they can be used to treat cells in vitro and the modified cells are administered to patients (ex vivo). Conventional viral based systems for the delivery of nucleic acids include, but are not limited to, retroviral, lentivirus, adenoviral, adeno-associated, vaccinia and herpes simplex virus vectors for gene transfer.

[0132] The tropism of a retrovirus can be altered by incorporating foreign envelope proteins, expanding the potential target population of target cells. Lentiviral vectors are retroviral vectors that are able to transduce or infect non-dividing cells and typically produce high viral titers. Selection of a retroviral gene transfer system depends on the target tissue. Retroviral vectors are comprised of cis-acting long terminal repeats with packaging capacity for up to 6-10 kb of foreign sequence. The minimum cis-acting LTRs are sufficient for replication and packaging of the vectors, which are then used to integrate the therapeutic gene into the target cell to provide permanent transgene expression. Widely used retroviral vectors include those based upon murine leukemia virus (MuLV), gibbon ape leukemia virus (GaLV), Simian Immunodeficiency virus (SIV), human immunodeficiency virus (HIV), and combinations thereof (See, e.g., Buchschacher et al. (1992) J. Virol. 66:2731-2739; Johann et al. (1992) J. Virol. 66:1635-1640; Sommerfelt et al. (1990) Virol. 176:58-59; Wilson et al. (1989) J. Virol. 63:2374-2378; Miller et al. (1991) J. Virol. 65:2220-2224; PCT/US94/05700).

[0133] At least six viral vector approaches are currently available for gene transfer in clinical trials, which utilize approaches that involve complementation of defective vectors by genes inserted into helper cell lines to generate the transducing agent.

[0134] pLASN and MFG-S are examples of retroviral vectors that have been used in clinical trials (Dunbar et al. (1995) Blood 85:3048-305; Kohn et al.(1995) Nat. Med. 1:1017-102; Malech et al. (1997) PNAS 94:22 12133-12138). PA317/pLASN was the first therapeutic vector used in a gene therapy trial. (Blaese et al. (1995). Transduction efficiencies of 50% or greater have been observed for MFG-S packaged vectors. (Ellem et al. (1997) Immunol Immunother. 44(1):10-20; Dranoff et al. (1997) Hum. Gene Ther. 1:111-2).

[0135] Packaging cells are used to form virus particles that are capable of infecting a host cell. Such cells include 293 cells, which package adenovirus, AAV, and Psi-2 cells or PA317 cells, which package retrovirus. Viral vectors used in gene therapy are usually generated by a producer cell line that packages a nucleic acid vector into a viral particle. The vectors typically contain the minimal viral sequences required for packaging and subsequent integration into a host (if applicable), other viral sequences being replaced by an expression cassette encoding the protein to be expressed. The missing viral functions are supplied in trans by the packaging cell line. For example, AAV vectors used in gene therapy typically only possess inverted terminal repeat (ITR) sequences from the AAV genome which are required for packaging and integration into the host genome. Viral DNA is packaged in a cell line, which contains a helper plasmid encoding the other AAV genes, namely rep and cap, but lacking ITR sequences. The cell line is also infected with adenovirus as a helper. The helper virus promotes replication of the AAV vector and expression of AAV genes from the helper plasmid. The helper plasmid is not packaged in significant amounts due to a lack of ITR sequences. Contamination with adenovirus can be reduced by, e.g., heat treatment to which adenovirus is more sensitive than AAV. Additionally, AAV can be produced at clinical scale using baculovirus systems (see U.S. Pat. No. 7,479,554).

[0136] In many gene therapy applications, it is desirable that the gene therapy vector be delivered with a high degree of specificity to a particular tissue type. Accordingly, a viral vector can be modified to have specificity for a given cell type by expressing a ligand as a fusion protein with a viral coat protein on the outer surface of the virus. The ligand is chosen to have affinity for a receptor known to be present on the cell type of interest. For example, Han et al. (1995) Proc. Natl. Acad. Sci. USA 92:9747-9751, reported that Moloney murine leukemia virus can be modified to express human heregulin fused to gp70, and the recombinant virus infects certain human breast cancer cells expressing human epidermal growth factor receptor. This principle can be extended to other virus-target cell pairs, in which the target cell expresses a receptor and the virus expresses a fusion protein comprising a ligand for the cell-surface receptor. For example, filamentous phage can be engineered to display antibody fragments (e.g., FAB or Fv) having specific binding affinity for virtually any chosen cellular receptor. Although the above description applies primarily to viral vectors, the same principles can be applied to nonviral vectors. Such vectors can be engineered to contain specific uptake sequences which favor uptake by specific target cells.

[0137] Gene therapy vectors can be delivered in vivo by administration to an individual patient, typically by systemic administration (e.g., intravitreal, intravenous, intraperitoneal, intramuscular, subdermal, or intracranial infusion) or topical application, as described below. Alternatively, vectors can be delivered to cells ex vivo, such as cells explanted from an individual patient (e.g., lymphocytes, bone marrow aspirates, tissue biopsy) or universal donor hematopoietic stem cells, followed by reimplantation of the cells into a patient, usually after selection for cells which have incorporated the vector.

[0138] Ex vivo cell transfection for diagnostics, research, or for gene therapy (e.g., via re-infusion of the transfected cells into the host organism) is well known to those of skill in the art. In a preferred embodiment, cells are isolated from the subject organism, transfected with a nucleic acid composition, and re-infused back into the subject organism (e.g., patient). Various cell types suitable for ex vivo transfection are well known to those of skill in the art (See, e.g., Freshney et al. (1994) Culture of Animal Cells, A Manual of Basic Technique, 3rd ed, and the references cited therein for a discussion of how to isolate and culture cells from patients).

[0139] Suitable cells include, but are not limited to, eukaryotic cells and/or cell lines. Non-limiting examples of such cells or cell lines generated from such cells include COS, CHO (e.g., CHO-S, CHO-K1, CHO-DG44, CHO-DUXB11, CHO-DUKX, CHOK1SV), VERO, MDCK, WI38, V79, B14AF28-G3, BHK, HaK, NSO, SP2/0-Ag14, HeLa, HEK293 (e.g., HEK293-F, HEK293-H, HEK293-T), perC6 cells, any plant cell (differentiated or undifferentiated), as well as insect cells such as Spodoptera fugiperda (Sf), or fungal cells such as Saccharomyces, Pichia and Schizosaccharomyces. In certain embodiments, the cell line is a CHO-K1, MDCK or HEK293 cell line. Additionally, primary cells may be isolated and used ex vivo for reintroduction into the subject to be treated following treatment with a guided nuclease system (e.g. CRISPR/Cas). Suitable primary cells include peripheral blood mononuclear cells (PBMC), and other blood cell subsets such as, but not limited to, CD4+ T cells or CD8+ T cells. Suitable cells also include stem cells such as, by way of example, embryonic stem cells, induced pluripotent stem cells, hematopoietic stem cells (CD34+), neuronal stem cells and mesenchymal stem cells.

[0140] In one embodiment, stem cells are used in ex vivo procedures for cell transfection and gene therapy. The advantage to using stem cells is that they can be differentiated into other cell types in vitro, or can be introduced into a mammal (such as the donor of the cells) where they will engraft in the bone marrow. Methods for differentiating CD34+ cells in vitro into clinically important immune cell types using cytokines such a GM-CSF, IFN-gamma, and TNF-alpha are known (as a non-limiting example see, Inaba et al., J. Exp. Med. 176:1693-1702 (1992)).

[0141] Stem cells are isolated for transduction and differentiation using known methods. For example, stem cells are isolated from bone marrow cells by panning the bone marrow cells with antibodies which bind unwanted cells, such as CD4+ and CD8+ (T cells), CD45+ (panB cells), GR-1 (granulocytes), and Tad (differentiated antigen presenting cells) (as a non-limiting example see Inaba et al. (1992) J. Exp. Med. 176:1693-1702). Stem cells that have been modified may also be used in some embodiments.

[0142] Any one of the RNA molecule compositions described herein is suitable for genome editing in post-mitotic cells or any cell which is not actively dividing, e.g., arrested cells. Examples of post-mitotic cells which may be edited using a composition of the present invention include, but are not limited to, a photoreceptor cell, a rod photoreceptor cell, a cone photoreceptor cell, a retinal pigment epithelium (RPE), a glial cell, Müller cell, and a ganglion.

[0143] Vectors (e.g., retroviruses, liposomes, etc.) containing therapeutic nucleic acid compositions can also be administered directly to an organism for transduction of cells in vivo. Administration is by any of the routes normally used for introducing a molecule into ultimate contact with blood or tissue cells including, but not limited to, injection, infusion, topical application (e.g., eye drops and cream) and electroporation. Suitable methods of administering such nucleic acids are available and well known to those of skill in the art, and, although more than one route can be used to administer a particular composition, a particular route can often provide a more immediate and more effective reaction than another route. According to some embodiments, the composition is delivered via sub-retinal injection. According to some embodiments, the composition is delivered via intravitreal injection.

[0144] Vectors suitable for introduction of transgenes into immune cells (e.g., T-cells) include non-integrating lentivirus vectors. See, e.g., U.S. Patent Publication No. 2009-0117617.

[0145] Pharmaceutically acceptable carriers are determined in part by the particular composition being administered, as well as by the particular method used to administer the composition. Accordingly, there is a wide variety of suitable formulations of pharmaceutical compositions available, as described below (See, e.g., Remington's Pharmaceutical Sciences, 17th ed., 1989).

[0146] In accordance with some embodiments, there is provided an RNA molecule which binds to/associates with and/or directs the RNA guided DNA nuclease to a sequence comprising at least one nucleotide which differs between a mutated allele and a functional allele (e.g., SNP) of a gene of interest (i.e., a sequence of the mutated allele which is not present in the functional allele). The sequence may be within the disease associated mutation. The sequence may be upstream or downstream to the disease associated mutation. Any sequence difference between the mutated allele and the functional allele may be targeted by an RNA molecule of the present invention to inactivate the mutant allele, or otherwise disable its dominant disease-causing effects, while preserving the activity of the functional allele.

[0147] The disclosed compositions and methods may also be used in the manufacture of a medicament for treating dominant genetic disorders in a patient.

Examples of RNA Guide Sequences which Specifically Target Mutated Alleles of IMDPH1 Gene

[0148] Although a large number of guide sequences can be designed to target a mutated allele, the nucleotide sequences described in Tables 2 identified by SEQ ID NOs: 1-3010 below were specifically selected to effectively implement the methods set forth herein and to effectively discriminate between alleles.

[0149] Referring to columns 1-4, each of SEQ ID NOs. 1-3010 indicated in column 1 corresponds to an engineered guide sequence. The corresponding SNP details are indicated in column 2. The SNP details indicated in the 2nd column include the assigned identifier for each SNP corresponding to a SNP ID indicated in Table 1. Column 3 indicates whether the target of each guide sequence is the IMDPH1 gene polymorph or wild type (REF) sequence. Column 4 indicates the guanine-cytosine content of each guide sequence.

[0150] Table 2 shows guide sequences designed for use as described in the embodiments above to associate with different SNPs within a sequence of a mutated IMDPH1 allele. Each engineered guide molecule is further designed such as to associate with a target genomic DNA sequence of interest that lies next to a protospacer adjacent motif (PAM), e.g., a PAM matching the sequence NGG or NAG, where “N” is any nucleobase. The guide sequences were designed to work in conjunction with one or more different CRISPR nucleases, including, but not limited to, e.g. SpCas9WT (PAM SEQ: NGG), SpCas9.VQR.1 (PAM SEQ: NGAN), SpCas9.VQR.2 (PAM SEQ: NGNG), SpCas9.EQR (PAM SEQ: NGAG), SpCas9.VRER (PAM SEQ: NGCG), SaCas9WT (PAM SEQ: NNGRRT), NmCas9WT (PAM SEQ: NNNNGATT), Cpf1 (PAM SEQ: TTTV), or JeCas9WT (PAM SEQ: NNNVRYM). RNA molecules of the present invention are each designed to form complexes in conjunction with one or more different CRISPR nucleases and designed to target polynucleotide sequences of interest utilizing one or more different PAM sequences respective to the CRISPR nuclease utilized

TABLE 2
Guide sequences designed to associate
with specific SNPs of the IMPDH1 gene

| SEQ ID NO: | SNP ID (Table 1) | Target (SNP/REF) | % GC |
|---|---|---|---|
| 1 | s1 | REF | 60% |
| 2 | s1 | SNP | 55% |
| 3 | s1 | REF | 60% |
| 4 | s1 | REF | 60% |
| 5 | s1 | SNP | 55% |
| 6 | s1 | REF | 65% |
| 7 | s1 | SNP | 60% |
| 8 | s1 | SNP | 55% |
| 9 | s1 | REF | 60% |
| 10 | s1 | SNP | 60% |
| 11 | s1 | REF | 65% |
| 12 | s1 | SNP | 50% |
| 13 | s1 | REF | 55% |
| 14 | s1 | REF | 65% |
| 15 | s1 | SNP | 60% |
| 16 | s1 | REF | 75% |
| 17 | s1 | SNP | 70% |
| 18 | s1 | REF | 70% |
| 19 | s1 | SNP | 65% |
| 20 | s1 | SNP | 55% |
| 21 | s1 | REF | 70% |
| 22 | s1 | SNP | 65% |
| 23 | s1 | SNP | 60% |
| 24 | s1 | REF | 65% |
| 25 | s1 | SNP | 50% |
| 26 | s1 | REF | 55% |
| 27 | s2 | SNP | 55% |
| 28 | s2 | REF | 60% |
| 29 | s2 | REF | 60% |
| 30 | s2 | SNP | 55% |
| 31 | s2 | REF | 60% |
| 32 | s2 | SNP | 55% |
| 33 | s2 | REF | 65% |
| 34 | s2 | SNP | 60% |
| 35 | s2 | REF | 60% |
| 36 | s2 | SNP | 55% |
| 37 | s2 | REF | 65% |
| 38 | s2 | SNP | 60% |
| 39 | s2 | SNP | 60% |
| 40 | s2 | REF | 65% |
| 41 | s2 | REF | 60% |
| 42 | s2 | SNP | 55% |
| 43 | s2 | REF | 65% |
| 44 | s2 | SNP | 60% |
| 45 | s2 | SNP | 55% |
| 46 | s2 | REF | 60% |
| 47 | s3 | SNP | 35% |
| 48 | s4 | SNP | 40% |
| 49 | s4 | SNP | 35% |
| 50 | s4 | SNP | 40% |
| 51 | s4 | SNP | 45% |
| 52 | s4 | SNP | 30% |
| 53 | s4 | SNP | 35% |
| 54 | s5 | SNP | 35% |
| 55 | s5 | REF | 40% |
| 56 | s5 | SNP | 55% |
| 57 | s5 | REF | 60% |
| 58 | s6 | SNP | 75% |
| 59 | s6 | REF | 80% |
| 60 | s6 | REF | 80% |
| 61 | s6 | SNP | 75% |
| 62 | s6 | SNP | 75% |
| 63 | s6 | REF | 80% |
| 64 | s6 | REF | 80% |
| 65 | s6 | REF | 80% |
| 66 | s6 | SNP | 75% |
| 67 | s6 | SNP | 80% |
| 68 | s6 | REF | 75% |
| 69 | s6 | REF | 80% |
| 70 | s6 | SNP | 75% |
| 71 | s5 | SNP | 35% |
| 72 | s5 | REF | 40% |
| 73 | s7 | SNP | 65% |
| 74 | s7 | REF | 70% |
| 75 | s7 | REF | 65% |
| 76 | s7 | SNP | 60% |
| 77 | s7 | REF | 65% |
| 78 | s7 | SNP | 60% |
| 79 | s7 | SNP | 65% |
| 80 | s7 | REF | 70% |
| 81 | s7 | REF | 65% |
| 82 | s7 | SNP | 60% |
| 83 | s7 | REF | 70% |
| 84 | s7 | SNP | 65% |
| 85 | s7 | SNP | 60% |
| 86 | s7 | REF | 70% |
| 87 | s7 | SNP | 65% |
| 88 | s7 | SNP | 70% |
| 89 | s7 | REF | 75% |
| 90 | s7 | REF | 70% |
| 91 | s7 | SNP | 65% |
| 92 | s7 | REF | 70% |
| 93 | s7 | SNP | 65% |
| 94 | s8 | REF | 50% |
| 95 | s8 | SNP | 50% |
| 96 | s8 | SNP | 45% |
| 97 | s8 | REF | 45% |
| 98 | s8 | REF | 50% |
| 99 | s8 | SNP | 50% |
| 100 | s8 | REF | 50% |
| 101 | s8 | SNP | 55% |
| 102 | s8 | REF | 55% |
| 103 | s9 | SNP | 35% |
| 104 | s9 | REF | 40% |
| 105 | s9 | SNP | 40% |
| 106 | s9 | REF | 45% |
| 107 | s9 | SNP | 45% |
| 108 | s9 | REF | 50% |
| 109 | s9 | SNP | 45% |
| 110 | s9 | REF | 50% |
| 111 | s9 | SNP | 45% |
| 112 | s9 | REF | 50% |
| 113 | s9 | REF | 40% |
| 114 | s9 | SNP | 50% |
| 115 | s9 | REF | 55% |
| 116 | s9 | REF | 60% |
| 117 | s9 | REF | 60% |
| 118 | s9 | SNP | 55% |
| 119 | s9 | REF | 50% |
| 120 | s9 | SNP | 45% |
| 121 | s9 | REF | 45% |
| 122 | s9 | SNP | 40% |
| 123 | s9 | SNP | 45% |
| 124 | s9 | REF | 50% |
| 125 | s10 | REF | 70% |
| 126 | s10 | SNP | 65% |
| 127 | s10 | REF | 55% |
| 128 | s10 | SNP | 50% |
| 129 | s10 | REF | 60% |
| 130 | s10 | SNP | 55% |
| 131 | s10 | REF | 65% |
| 132 | s10 | SNP | 60% |
| 133 | s10 | REF | 70% |
| 134 | s10 | SNP | 65% |
| 135 | s10 | REF | 65% |
| 136 | s10 | REF | 65% |
| 137 | s10 | SNP | 60% |
| 138 | s10 | REF | 70% |
| 139 | s10 | SNP | 65% |
| 140 | s10 | REF | 60% |
| 141 | s10 | SNP | 55% |
| 142 | s11 | REF | 55% |
| 143 | s11 | SNP | 60% |
| 144 | s11 | REF | 65% |
| 145 | s11 | SNP | 70% |
| 146 | s11 | SNP | 65% |
| 147 | s11 | REF | 60% |
| 148 | s11 | REF | 60% |
| 149 | s11 | SNP | 65% |
| 150 | s11 | REF | 60% |
| 151 | s11 | SNP | 65% |
| 152 | s11 | REF | 60% |
| 153 | s12 | SNP | 50% |
| 154 | s12 | SNP | 50% |
| 155 | s12 | SNP | 65% |
| 156 | s12 | REF | 70% |
| 157 | s12 | SNP | 50% |
| 158 | s12 | SNP | 50% |
| 159 | s13 | REF | 45% |
| 160 | s13 | REF | 45% |
| 161 | s13 | REF | 50% |
| 162 | s15 | SNP | 35% |
| 163 | s15 | REF | 40% |
| 164 | s15 | REF | 30% |
| 165 | s15 | REF | 35% |
| 166 | s15 | SNP | 30% |
| 167 | s15 | REF | 35% |
| 168 | s15 | REF | 30% |
| 169 | s17 | SNP | 35% |
| 170 | s17 | REF | 30% |
| 171 | s17 | SNP | 40% |
| 172 | s17 | REF | 35% |
| 173 | s17 | SNP | 50% |
| 174 | s17 | REF | 45% |
| 175 | s17 | REF | 30% |
| 176 | s17 | SNP | 35% |
| 177 | s17 | REF | 30% |
| 178 | s17 | SNP | 35% |
| 179 | s17 | REF | 35% |
| 180 | s17 | SNP | 40% |
| 181 | s17 | REF | 30% |
| 182 | s17 | SNP | 35% |
| 183 | s17 | SNP | 35% |
| 184 | s17 | REF | 30% |
| 185 | s17 | REF | 30% |
| 186 | s17 | REF | 30% |
| 187 | s18 | SNP | 40% |
| 188 | s18 | REF | 35% |
| 189 | s18 | REF | 35% |
| 190 | s18 | SNP | 40% |
| 191 | s18 | SNP | 35% |
| 192 | s18 | REF | 30% |
| 193 | s18 | REF | 30% |
| 194 | s18 | SNP | 35% |
| 195 | s18 | REF | 30% |
| 196 | s18 | SNP | 35% |
| 197 | s18 | SNP | 35% |
| 198 | s18 | SNP | 35% |
| 199 | s18 | REF | 30% |
| 200 | s19 | REF | 45% |
| 201 | s19 | SNP | 50% |
| 202 | s19 | REF | 45% |
| 203 | s19 | SNP | 50% |
| 204 | s19 | REF | 50% |
| 205 | s19 | SNP | 55% |
| 206 | s19 | REF | 50% |
| 207 | s19 | REF | 50% |
| 208 | s19 | SNP | 55% |
| 209 | s19 | SNP | 50% |
| 210 | s19 | REF | 45% |
| 211 | s19 | REF | 60% |
| 212 | s19 | SNP | 65% |
| 213 | s19 | SNP | 55% |
| 214 | s19 | REF | 55% |
| 215 | s19 | SNP | 60% |
| 216 | s19 | REF | 50% |
| 217 | s19 | SNP | 55% |
| 218 | s19 | SNP | 55% |
| 219 | s19 | REF | 50% |
| 220 | s21 | SNP | 40% |
| 221 | s21 | REF | 35% |
| 222 | s21 | SNP | 40% |
| 223 | s22 | SNP | 50% |
| 224 | s22 | REF | 30% |
| 225 | s22 | REF | 45% |
| 226 | s22 | SNP | 50% |
| 227 | s22 | REF | 45% |
| 228 | s22 | REF | 45% |
| 229 | s22 | SNP | 50% |
| 230 | s23 | SNP | 70% |
| 231 | s23 | REF | 70% |
| 232 | s23 | SNP | 75% |
| 233 | s23 | SNP | 75% |
| 234 | s23 | REF | 70% |
| 235 | s23 | REF | 65% |
| 236 | s23 | SNP | 70% |
| 237 | s23 | REF | 65% |
| 238 | s23 | SNP | 70% |
| 239 | s23 | REF | 70% |
| 240 | s23 | SNP | 75% |
| 241 | s23 | REF | 65% |
| 242 | s23 | REF | 60% |
| 243 | s23 | SNP | 65% |
| 244 | s23 | SNP | 70% |
| 245 | s23 | SNP | 65% |
| 246 | s23 | REF | 60% |
| 247 | s24 | SNP | 65% |
| 248 | s24 | SNP | 55% |
| 249 | s24 | REF | 55% |
| 250 | s25 | REF | 75% |
| 251 | s25 | REF | 75% |
| 252 | s25 | SNP | 80% |
| 253 | s25 | SNP | 80% |
| 254 | s25 | REF | 75% |
| 255 | s25 | REF | 80% |
| 256 | s25 | SNP | 80% |
| 257 | s25 | SNP | 80% |
| 258 | s25 | REF | 75% |
| 259 | s25 | SNP | 80% |
| 260 | s25 | REF | 75% |
| 261 | s25 | REF | 75% |
| 262 | s25 | SNP | 80% |
| 263 | s25 | SNP | 80% |
| 264 | s25 | REF | 75% |
| 265 | s25 | REF | 75% |
| 266 | s25 | SNP | 80% |
| 267 | s25 | REF | 75% |
| 268 | s25 | SNP | 80% |
| 269 | s25 | SNP | 80% |
| 270 | s25 | REF | 75% |
| 271 | s25 | REF | 80% |
| 272 | s24 | REF | 60% |
| 273 | s24 | SNP | 60% |
| 274 | s24 | REF | 60% |
| 275 | s24 | REF | 60% |
| 276 | s24 | REF | 60% |
| 277 | s24 | REF | 65% |
| 278 | s24 | SNP | 65% |
| 279 | s24 | REF | 65% |
| 280 | s24 | SNP | 55% |
| 281 | s24 | SNP | 70% |
| 282 | s24 | REF | 60% |
| 283 | s26 | SNP | 45% |
| 284 | s26 | SNP | 55% |
| 285 | s26 | SNP | 45% |
| 286 | s26 | SNP | 50% |
| 287 | s26 | SNP | 50% |
| 288 | s26 | SNP | 50% |
| 289 | s26 | SNP | 55% |
| 290 | s26 | SNP | 45% |
| 291 | s26 | SNP | 55% |
| 292 | s27 | REF | 65% |
| 293 | s27 | REF | 60% |
| 294 | s28 | REF | 60% |
| 295 | s28 | SNP | 55% |
| 296 | s28 | REF | 70% |
| 297 | s28 | SNP | 65% |
| 298 | s28 | REF | 55% |
| 299 | s28 | SNP | 50% |
| 300 | s28 | SNP | 60% |
| 301 | s28 | REF | 65% |
| 302 | s28 | REF | 50% |
| 303 | s28 | SNP | 45% |
| 304 | s28 | REF | 50% |
| 305 | s28 | SNP | 45% |
| 306 | s29 | REF | 65% |
| 307 | s29 | SNP | 60% |
| 308 | s29 | REF | 55% |
| 309 | s29 | SNP | 50% |
| 310 | s29 | REF | 55% |
| 311 | s29 | SNP | 50% |
| 312 | s29 | REF | 60% |
| 313 | s29 | SNP | 55% |
| 314 | s29 | REF | 55% |
| 315 | s29 | SNP | 50% |
| 316 | s29 | REF | 55% |
| 317 | s29 | SNP | 50% |
| 318 | s29 | SNP | 55% |
| 319 | s29 | REF | 60% |
| 320 | s29 | SNP | 50% |
| 321 | s29 | REF | 55% |
| 322 | s29 | REF | 60% |
| 323 | s29 | SNP | 55% |
| 324 | s29 | REF | 55% |
| 325 | s29 | SNP | 50% |
| 326 | s29 | REF | 60% |
| 327 | s29 | SNP | 55% |
| 328 | s29 | SNP | 65% |
| 329 | s29 | REF | 70% |
| 330 | s29 | SNP | 65% |
| 331 | s29 | REF | 70% |
| 332 | s29 | REF | 60% |
| 333 | s29 | SNP | 55% |
| 334 | s30 | REF | 65% |
| 335 | s30 | SNP | 60% |
| 336 | s30 | REF | 65% |
| 337 | s30 | SNP | 60% |
| 338 | s30 | REF | 65% |
| 339 | s30 | REF | 65% |
| 340 | s30 | SNP | 60% |
| 341 | s30 | REF | 65% |
| 342 | s30 | REF | 60% |
| 343 | s30 | SNP | 55% |
| 344 | s30 | REF | 60% |
| 345 | s30 | REF | 70% |
| 346 | s30 | SNP | 55% |
| 347 | s31 | SNP | 35% |
| 348 | s31 | SNP | 35% |
| 349 | s31 | SNP | 35% |
| 350 | s31 | SNP | 30% |
| 351 | s31 | SNP | 30% |
| 352 | s31 | SNP | 45% |
| 353 | s31 | SNP | 35% |
| 354 | s31 | SNP | 35% |
| 355 | s31 | SNP | 30% |
| 356 | s31 | SNP | 35% |
| 357 | s31 | SNP | 30% |
| 358 | s31 | SNP | 35% |
| 359 | s31 | REF | 40% |
| 360 | s32 | SNP | 60% |
| 361 | s32 | REF | 65% |
| 362 | s32 | SNP | 55% |
| 363 | s32 | REF | 60% |
| 364 | s32 | REF | 65% |
| 365 | s32 | SNP | 60% |
| 366 | s32 | SNP | 60% |
| 367 | s32 | REF | 65% |
| 368 | s32 | SNP | 55% |
| 369 | s32 | REF | 60% |
| 370 | s32 | REF | 70% |
| 371 | s32 | SNP | 65% |
| 372 | s32 | SNP | 50% |
| 373 | s32 | REF | 55% |
| 374 | s32 | SNP | 55% |
| 375 | s32 | REF | 60% |
| 376 | s32 | REF | 65% |
| 377 | s32 | SNP | 60% |
| 378 | s33 | REF | 70% |
| 379 | s33 | SNP | 65% |
| 380 | s33 | REF | 70% |
| 381 | s33 | SNP | 65% |
| 382 | s33 | REF | 70% |
| 383 | s33 | REF | 70% |
| 384 | s33 | SNP | 65% |
| 385 | s33 | REF | 75% |
| 386 | s33 | REF | 70% |
| 387 | s33 | SNP | 65% |
| 388 | s33 | SNP | 70% |
| 389 | s33 | REF | 75% |
| 390 | s33 | REF | 75% |
| 391 | s33 | REF | 70% |
| 392 | s33 | SNP | 65% |
| 393 | s33 | REF | 70% |
| 394 | s33 | REF | 75% |
| 395 | s33 | SNP | 70% |
| 396 | s33 | REF | 75% |
| 397 | s33 | REF | 75% |
| 398 | s33 | SNP | 70% |
| 399 | s33 | SNP | 70% |
| 400 | s33 | SNP | 70% |
| 401 | s33 | REF | 70% |
| 402 | s33 | SNP | 65% |
| 403 | s34 | SNP | 30% |
| 404 | s34 | REF | 35% |
| 405 | s34 | SNP | 35% |
| 406 | s34 | REF | 40% |
| 407 | s34 | REF | 50% |
| 408 | s34 | SNP | 45% |
| 409 | s34 | SNP | 40% |
| 410 | s34 | REF | 45% |
| 411 | s34 | REF | 50% |
| 412 | s34 | SNP | 45% |
| 413 | s34 | SNP | 35% |
| 414 | s34 | REF | 40% |
| 415 | s34 | SNP | 45% |
| 416 | s34 | REF | 50% |
| 417 | s34 | SNP | 45% |
| 418 | s34 | SNP | 45% |
| 419 | s34 | REF | 50% |
| 420 | s36 | REF | 55% |
| 421 | s36 | SNP | 60% |
| 422 | s36 | SNP | 40% |
| 423 | s36 | SNP | 45% |
| 424 | s36 | REF | 40% |
| 425 | s36 | SNP | 55% |
| 426 | s36 | REF | 50% |
| 427 | s36 | REF | 50% |
| 428 | s36 | SNP | 55% |
| 429 | s36 | SNP | 45% |
| 430 | s36 | REF | 55% |
| 431 | s36 | REF | 45% |
| 432 | s36 | REF | 60% |
| 433 | s36 | SNP | 65% |
| 434 | s36 | SNP | 60% |
| 435 | s36 | REF | 55% |
| 436 | s36 | SNP | 50% |
| 437 | s36 | SNP | 60% |
| 438 | s36 | REF | 55% |
| 439 | s36 | REF | 55% |
| 440 | s36 | SNP | 60% |
| 441 | s37 | SNP | 75% |
| 442 | s37 | SNP | 75% |
| 443 | s37 | SNP | 70% |
| 444 | s37 | SNP | 75% |
| 445 | s37 | SNP | 75% |
| 446 | s37 | REF | 75% |
| 447 | s37 | SNP | 80% |
| 448 | s37 | SNP | 75% |
| 449 | s37 | REF | 75% |
| 450 | s37 | SNP | 80% |
| 451 | s37 | SNP | 75% |
| 452 | s37 | SNP | 75% |
| 453 | s37 | SNP | 70% |
| 454 | s37 | SNP | 70% |
| 455 | s37 | SNP | 70% |
| 456 | s38 | SNP | 60% |
| 457 | s38 | REF | 60% |
| 458 | s38 | REF | 45% |
| 459 | s38 | REF | 45% |
| 460 | s38 | SNP | 45% |
| 461 | s38 | SNP | 45% |
| 462 | s38 | REF | 45% |
| 463 | s38 | SNP | 60% |
| 464 | s38 | REF | 60% |
| 465 | s38 | SNP | 50% |
| 466 | s38 | REF | 50% |
| 467 | s38 | REF | 60% |
| 468 | s38 | SNP | 60% |
| 469 | s38 | REF | 55% |
| 470 | s38 | SNP | 55% |
| 471 | s38 | REF | 50% |
| 472 | s38 | SNP | 60% |
| 473 | s38 | REF | 60% |
| 474 | s38 | SNP | 65% |
| 475 | s38 | SNP | 50% |
| 476 | s38 | REF | 45% |
| 477 | s38 | SNP | 45% |
| 478 | s38 | SNP | 55% |
| 479 | s38 | REF | 55% |
| 480 | s39 | SNP | 75% |
| 481 | s39 | REF | 80% |
| 482 | s39 | SNP | 75% |
| 483 | s39 | REF | 75% |
| 484 | s39 | REF | 80% |
| 485 | s39 | SNP | 70% |
| 486 | s39 | REF | 75% |
| 487 | s39 | REF | 75% |
| 488 | s39 | SNP | 70% |
| 489 | s39 | REF | 70% |
| 490 | s39 | SNP | 65% |
| 491 | s39 | SNP | 70% |
| 492 | s39 | REF | 75% |
| 493 | s39 | SNP | 75% |
| 494 | s39 | REF | 80% |
| 495 | s39 | REF | 70% |
| 496 | s39 | SNP | 70% |
| 497 | s39 | REF | 80% |
| 498 | s39 | SNP | 65% |
| 499 | s39 | SNP | 70% |
| 500 | s39 | REF | 75% |
| 501 | s39 | SNP | 75% |
| 502 | s39 | REF | 75% |
| 503 | s39 | SNP | 70% |
| 504 | s39 | REF | 80% |
| 505 | s39 | SNP | 65% |
| 506 | s39 | REF | 70% |
| 507 | s39 | SNP | 70% |
| 508 | s39 | REF | 75% |
| 509 | s39 | REF | 70% |
| 510 | s39 | SNP | 65% |
| 511 | s39 | SNP | 70% |
| 512 | s39 | REF | 75% |
| 513 | s39 | SNP | 70% |
| 514 | s39 | REF | 75% |
| 515 | s40 | SNP | 75% |
| 516 | s40 | REF | 70% |
| 517 | s40 | REF | 70% |
| 518 | s40 | SNP | 75% |
| 519 | s40 | SNP | 75% |
| 520 | s40 | REF | 70% |
| 521 | s40 | SNP | 75% |
| 522 | s40 | REF | 70% |
| 523 | s40 | REF | 70% |
| 524 | s40 | SNP | 75% |
| 525 | s40 | REF | 70% |
| 526 | s40 | SNP | 75% |
| 527 | s40 | REF | 70% |
| 528 | s40 | SNP | 75% |
| 529 | s40 | SNP | 75% |
| 530 | s40 | REF | 70% |
| 531 | s40 | REF | 70% |
| 532 | s40 | SNP | 70% |
| 533 | s40 | REF | 65% |
| 534 | s40 | SNP | 70% |
| 535 | s40 | REF | 65% |
| 536 | s40 | SNP | 65% |
| 537 | s40 | REF | 60% |
| 538 | s40 | SNP | 70% |
| 539 | s40 | REF | 65% |
| 540 | s40 | REF | 65% |
| 541 | s40 | SNP | 70% |
| 542 | s41 | SNP | 35% |
| 543 | s42 | REF | 50% |
| 544 | s42 | SNP | 55% |
| 545 | s42 | SNP | 30% |
| 546 | s42 | REF | 40% |
| 547 | s42 | SNP | 45% |
| 548 | s42 | REF | 45% |
| 549 | s42 | SNP | 50% |
| 550 | s42 | REF | 45% |
| 551 | s42 | SNP | 50% |
| 552 | s42 | SNP | 50% |
| 553 | s42 | REF | 45% |
| 554 | s42 | SNP | 50% |
| 555 | s42 | REF | 45% |
| 556 | s42 | SNP | 50% |
| 557 | s42 | REF | 45% |
| 558 | s43 | REF | 55% |
| 559 | s43 | SNP | 60% |
| 560 | s43 | REF | 55% |
| 561 | s43 | REF | 65% |
| 562 | s43 | SNP | 70% |
| 563 | s43 | REF | 50% |
| 564 | s43 | SNP | 55% |
| 565 | s43 | SNP | 60% |
| 566 | s43 | SNP | 60% |
| 567 | s43 | REF | 55% |
| 568 | s43 | SNP | 60% |
| 569 | s43 | REF | 55% |
| 570 | s43 | REF | 60% |
| 571 | s43 | SNP | 65% |
| 572 | s43 | SNP | 55% |
| 573 | s43 | REF | 50% |
| 574 | s43 | REF | 55% |
| 575 | s43 | SNP | 60% |
| 576 | s43 | SNP | 70% |
| 577 | s43 | REF | 65% |
| 578 | s44 | SNP | 45% |
| 579 | s44 | REF | 55% |
| 580 | s44 | SNP | 60% |
| 581 | s44 | REF | 50% |
| 582 | s44 | SNP | 55% |
| 583 | s44 | REF | 60% |
| 584 | s44 | REF | 60% |
| 585 | s44 | REF | 60% |
| 586 | s44 | REF | 55% |
| 587 | s44 | REF | 60% |
| 588 | s44 | REF | 60% |
| 589 | s44 | REF | 55% |
| 590 | s45 | SNP | 65% |
| 591 | s45 | REF | 75% |
| 592 | s45 | REF | 75% |
| 593 | s45 | REF | 75% |
| 594 | s45 | SNP | 70% |
| 595 | s45 | REF | 80% |
| 596 | s45 | REF | 75% |
| 597 | s45 | SNP | 75% |
| 598 | s45 | REF | 75% |
| 599 | s45 | SNP | 70% |
| 600 | s45 | REF | 75% |
| 601 | s45 | SNP | 70% |
| 602 | s45 | REF | 80% |
| 603 | s45 | SNP | 75% |
| 604 | s45 | REF | 75% |
| 605 | s45 | REF | 70% |
| 606 | s45 | REF | 75% |
| 607 | s45 | SNP | 70% |
| 608 | s45 | REF | 70% |
| 609 | s45 | SNP | 65% |
| 610 | s45 | REF | 75% |
| 611 | s46 | REF | 60% |
| 612 | s46 | SNP | 55% |
| 613 | s46 | SNP | 60% |
| 614 | s46 | REF | 65% |
| 615 | s46 | REF | 70% |
| 616 | s46 | SNP | 65% |
| 617 | s46 | SNP | 65% |
| 618 | s46 | REF | 70% |
| 619 | s46 | SNP | 70% |
| 620 | s46 | REF | 75% |
| 621 | s46 | REF | 75% |
| 622 | s46 | SNP | 70% |
| 623 | s46 | REF | 70% |
| 624 | s46 | SNP | 65% |
| 625 | s46 | REF | 70% |
| 626 | s46 | SNP | 65% |
| 627 | s46 | REF | 70% |
| 628 | s46 | SNP | 65% |
| 629 | s46 | REF | 70% |
| 630 | s46 | SNP | 65% |
| 631 | s47 | REF | 65% |
| 632 | s47 | SNP | 70% |
| 633 | s47 | REF | 70% |
| 634 | s47 | SNP | 60% |
| 635 | s47 | REF | 55% |
| 636 | s47 | REF | 75% |
| 637 | s47 | REF | 75% |
| 638 | s47 | SNP | 60% |
| 639 | s47 | REF | 55% |
| 640 | s47 | REF | 75% |
| 641 | s47 | SNP | 80% |
| 642 | s47 | SNP | 80% |
| 643 | s47 | REF | 75% |
| 644 | s47 | SNP | 65% |
| 645 | s47 | REF | 60% |
| 646 | s47 | SNP | 80% |
| 647 | s47 | REF | 75% |
| 648 | s47 | SNP | 80% |
| 649 | s47 | REF | 65% |
| 650 | s47 | SNP | 70% |
| 651 | s47 | REF | 60% |
| 652 | s47 | SNP | 65% |
| 653 | s47 | SNP | 80% |
| 654 | s47 | REF | 75% |
| 655 | s47 | SNP | 80% |
| 656 | s47 | REF | 60% |
| 657 | s48 | REF | 55% |
| 658 | s48 | SNP | 55% |
| 659 | s48 | REF | 55% |
| 660 | s49 | REF | 60% |
| 661 | s49 | REF | 60% |
| 662 | s49 | REF | 70% |
| 663 | s49 | REF | 70% |
| 664 | s49 | REF | 65% |
| 665 | s50 | REF | 60% |
| 666 | s50 | SNP | 55% |
| 667 | s50 | REF | 60% |
| 668 | s50 | SNP | 55% |
| 669 | s50 | SNP | 50% |
| 670 | s50 | REF | 55% |
| 671 | s48 | SNP | 55% |
| 672 | s48 | SNP | 55% |
| 673 | s48 | REF | 55% |
| 674 | s48 | SNP | 50% |
| 675 | s48 | REF | 50% |
| 676 | s48 | SNP | 45% |
| 677 | s48 | REF | 45% |
| 678 | s48 | REF | 70% |
| 679 | s48 | SNP | 45% |
| 680 | s48 | REF | 45% |
| 681 | s51 | SNP | 60% |
| 682 | s51 | REF | 55% |
| 683 | s51 | SNP | 55% |
| 684 | s51 | REF | 50% |
| 685 | s51 | REF | 55% |
| 686 | s51 | SNP | 60% |
| 687 | s51 | SNP | 55% |
| 688 | s1 | REF | 55% |
| 689 | s1 | SNP | 50% |
| 690 | s1 | SNP | 75% |
| 691 | s1 | SNP | 65% |
| 692 | s1 | REF | 70% |
| 693 | s1 | SNP | 65% |
| 694 | s1 | REF | 70% |
| 695 | s1 | REF | 60% |
| 696 | s1 | REF | 65% |
| 697 | s1 | SNP | 60% |
| 698 | s1 | SNP | 60% |
| 699 | s1 | REF | 65% |
| 700 | s1 | REF | 70% |
| 701 | s1 | SNP | 65% |
| 702 | s1 | SNP | 55% |
| 703 | s1 | REF | 60% |
| 704 | s1 | SNP | 55% |
| 705 | s1 | SNP | 65% |
| 706 | s1 | REF | 70% |
| 707 | s1 | REF | 55% |
| 708 | s1 | REF | 70% |
| 709 | s1 | SNP | 65% |
| 710 | s1 | SNP | 55% |
| 711 | s1 | REF | 60% |
| 712 | s1 | REF | 60% |
| 713 | s1 | SNP | 55% |
| 714 | s1 | REF | 80% |
| 715 | s1 | REF | 60% |
| 716 | s1 | REF | 75% |
| 717 | s1 | SNP | 70% |
| 718 | s1 | SNP | 55% |
| 719 | s1 | REF | 80% |
| 720 | s1 | SNP | 75% |
| 721 | s1 | SNP | 70% |
| 722 | s1 | REF | 75% |
| 723 | s1 | SNP | 50% |
| 724 | s1 | REF | 55% |
| 725 | s1 | SNP | 70% |
| 726 | s1 | SNP | 65% |
| 727 | s1 | REF | 70% |
| 728 | s1 | REF | 55% |
| 729 | s1 | SNP | 55% |
| 730 | s1 | REF | 60% |
| 731 | s1 | SNP | 55% |
| 732 | s1 | REF | 60% |
| 733 | s1 | SNP | 50% |
| 734 | s1 | REF | 75% |
| 735 | s1 | SNP | 50% |
| 736 | s1 | REF | 55% |
| 737 | s2 | REF | 65% |
| 738 | s2 | REF | 60% |
| 739 | s2 | REF | 60% |
| 740 | s2 | SNP | 55% |
| 741 | s2 | SNP | 55% |
| 742 | s2 | REF | 60% |
| 743 | s2 | SNP | 60% |
| 744 | s2 | REF | 65% |
| 745 | s2 | SNP | 55% |
| 746 | s2 | SNP | 55% |
| 747 | s2 | SNP | 55% |
| 748 | s2 | REF | 60% |
| 749 | s2 | REF | 60% |
| 750 | s2 | SNP | 55% |
| 751 | s2 | SNP | 60% |
| 752 | s2 | REF | 65% |
| 753 | s2 | SNP | 60% |
| 754 | s2 | REF | 65% |
| 755 | s2 | SNP | 60% |
| 756 | s2 | REF | 65% |
| 757 | s2 | REF | 65% |
| 758 | s2 | SNP | 55% |
| 759 | s2 | REF | 60% |
| 760 | s2 | SNP | 55% |
| 761 | s2 | REF | 60% |
| 762 | s2 | SNP | 55% |
| 763 | s2 | REF | 60% |
| 764 | s2 | REF | 65% |
| 765 | s2 | SNP | 60% |
| 766 | s2 | REF | 65% |
| 767 | s2 | SNP | 60% |
| 768 | s2 | REF | 60% |
| 769 | s2 | SNP | 60% |
| 770 | s2 | REF | 65% |
| 771 | s2 | SNP | 55% |
| 772 | s2 | SNP | 60% |
| 773 | s2 | REF | 65% |
| 774 | s2 | SNP | 60% |
| 775 | s2 | SNP | 60% |
| 776 | s2 | REF | 65% |
| 777 | s2 | REF | 65% |
| 778 | s2 | SNP | 60% |
| 779 | s2 | REF | 65% |
| 780 | s2 | SNP | 60% |
| 781 | s2 | SNP | 60% |
| 782 | s2 | REF | 65% |
| 783 | s2 | REF | 65% |
| 784 | s2 | REF | 60% |
| 785 | s2 | REF | 60% |
| 786 | s2 | SNP | 60% |
| 787 | s2 | REF | 65% |
| 788 | s2 | SNP | 60% |
| 789 | s2 | SNP | 55% |
| 790 | s2 | REF | 60% |
| 791 | s2 | REF | 60% |
| 792 | s2 | SNP | 55% |
| 793 | s2 | REF | 60% |
| 794 | s2 | SNP | 55% |
| 795 | s3 | SNP | 45% |
| 796 | s3 | SNP | 50% |
| 797 | s3 | SNP | 30% |
| 798 | s3 | SNP | 50% |
| 799 | s3 | SNP | 35% |
| 800 | s3 | SNP | 45% |
| 801 | s3 | SNP | 30% |
| 802 | s3 | SNP | 55% |
| 803 | s3 | SNP | 40% |
| 804 | s3 | SNP | 35% |
| 805 | s3 | SNP | 40% |
| 806 | s4 | SNP | 55% |
| 807 | s4 | SNP | 30% |
| 808 | s4 | SNP | 55% |
| 809 | s4 | SNP | 60% |
| 810 | s4 | SNP | 35% |
| 811 | s4 | SNP | 60% |
| 812 | s4 | SNP | 40% |
| 813 | s4 | SNP | 60% |
| 814 | s4 | SNP | 35% |
| 815 | s4 | SNP | 35% |
| 816 | s4 | SNP | 35% |
| 817 | s4 | SNP | 45% |
| 818 | s4 | SNP | 55% |
| 819 | s4 | SNP | 35% |
| 820 | s4 | SNP | 50% |
| 821 | s4 | SNP | 30% |
| 822 | s4 | SNP | 50% |
| 823 | s4 | SNP | 55% |
| 824 | s4 | SNP | 40% |
| 825 | s4 | SNP | 60% |
| 826 | s4 | SNP | 60% |
| 827 | s4 | SNP | 30% |
| 828 | s4 | SNP | 65% |
| 829 | s4 | SNP | 35% |
| 830 | s4 | SNP | 50% |
| 831 | s4 | SNP | 30% |
| 832 | s4 | SNP | 45% |
| 833 | s4 | SNP | 30% |
| 834 | s4 | SNP | 50% |
| 835 | s4 | SNP | 60% |
| 836 | s4 | SNP | 50% |
| 837 | s4 | SNP | 45% |
| 838 | s5 | SNP | 40% |
| 839 | s5 | REF | 45% |
| 840 | s5 | SNP | 30% |
| 841 | s5 | REF | 35% |
| 842 | s5 | SNP | 55% |
| 843 | s5 | REF | 60% |
| 844 | s5 | SNP | 40% |
| 845 | s5 | REF | 45% |
| 846 | s5 | REF | 40% |
| 847 | s5 | SNP | 35% |
| 848 | s5 | REF | 40% |
| 849 | s5 | REF | 60% |
| 850 | s5 | SNP | 55% |
| 851 | s5 | SNP | 55% |
| 852 | s5 | SNP | 35% |
| 853 | s5 | REF | 40% |
| 854 | s5 | REF | 60% |
| 855 | s5 | SNP | 55% |
| 856 | s5 | REF | 60% |
| 857 | s5 | REF | 40% |
| 858 | s5 | SNP | 35% |
| 859 | s5 | SNP | 55% |
| 860 | s5 | SNP | 35% |
| 861 | s5 | SNP | 45% |
| 862 | s5 | REF | 50% |
| 863 | s5 | REF | 40% |
| 864 | s5 | SNP | 35% |
| 865 | s5 | REF | 45% |
| 866 | s5 | SNP | 40% |
| 867 | s5 | REF | 40% |
| 868 | s5 | SNP | 40% |
| 869 | s5 | REF | 45% |
| 870 | s6 | REF | 80% |
| 871 | s6 | REF | 80% |
| 872 | s6 | SNP | 75% |
| 873 | s6 | REF | 80% |
| 874 | s6 | REF | 80% |
| 875 | s6 | REF | 80% |
| 876 | s6 | SNP | 75% |
| 877 | s6 | SNP | 75% |
| 878 | s6 | SNP | 75% |
| 879 | s6 | REF | 80% |
| 880 | s6 | SNP | 80% |
| 881 | s6 | REF | 80% |
| 882 | s6 | REF | 80% |
| 883 | s6 | SNP | 75% |
| 884 | s6 | SNP | 80% |
| 885 | s6 | SNP | 80% |
| 886 | s6 | REF | 80% |
| 887 | s6 | REF | 80% |
| 888 | s6 | SNP | 75% |
| 889 | s6 | SNP | 75% |
| 890 | s6 | REF | 80% |
| 891 | s6 | SNP | 75% |
| 892 | s5 | SNP | 55% |
| 893 | s5 | REF | 60% |
| 894 | s5 | REF | 40% |
| 895 | s5 | SNP | 35% |
| 896 | s5 | REF | 40% |
| 897 | s5 | REF | 60% |
| 898 | s5 | SNP | 55% |
| 899 | s5 | REF | 65% |
| 900 | s5 | SNP | 60% |
| 901 | s5 | SNP | 55% |
| 902 | s5 | REF | 45% |
| 903 | s5 | SNP | 40% |
| 904 | s5 | SNP | 35% |
| 905 | s5 | REF | 40% |
| 906 | s5 | SNP | 60% |
| 907 | s5 | REF | 65% |
| 908 | s5 | REF | 60% |
| 909 | s5 | SNP | 55% |
| 910 | s5 | REF | 60% |
| 911 | s5 | REF | 55% |
| 912 | s5 | SNP | 50% |
| 913 | s5 | REF | 60% |
| 914 | s5 | REF | 40% |
| 915 | s5 | SNP | 35% |
| 916 | s5 | REF | 50% |
| 917 | s5 | SNP | 45% |
| 918 | s5 | REF | 60% |
| 919 | s5 | SNP | 55% |
| 920 | s5 | SNP | 55% |
| 921 | s5 | REF | 60% |
| 922 | s5 | SNP | 35% |
| 923 | s5 | REF | 35% |
| 924 | s5 | REF | 60% |
| 925 | s5 | SNP | 55% |
| 926 | s5 | REF | 45% |
| 927 | s5 | SNP | 40% |
| 928 | s5 | SNP | 50% |
| 929 | s5 | REF | 55% |
| 930 | s5 | REF | 60% |
| 931 | s5 | SNP | 55% |
| 932 | s7 | SNP | 60% |
| 933 | s7 | REF | 65% |
| 934 | s7 | SNP | 65% |
| 935 | s7 | REF | 70% |
| 936 | s7 | REF | 70% |
| 937 | s7 | SNP | 65% |
| 938 | s7 | SNP | 65% |
| 939 | s7 | REF | 70% |
| 940 | s7 | REF | 65% |
| 941 | s7 | SNP | 60% |
| 942 | s7 | SNP | 65% |
| 943 | s7 | REF | 70% |
| 944 | s7 | REF | 65% |
| 945 | s7 | SNP | 65% |
| 946 | s7 | REF | 70% |
| 947 | s7 | REF | 65% |
| 948 | s7 | SNP | 65% |
| 949 | s7 | SNP | 65% |
| 950 | s7 | REF | 70% |
| 951 | s7 | SNP | 65% |
| 952 | s7 | REF | 70% |
| 953 | s7 | REF | 75% |
| 954 | s7 | SNP | 70% |
| 955 | s7 | REF | 70% |
| 956 | s7 | SNP | 65% |
| 957 | s7 | REF | 75% |
| 958 | s7 | SNP | 70% |
| 959 | s7 | REF | 70% |
| 960 | s7 | SNP | 70% |
| 961 | s7 | REF | 75% |
| 962 | s7 | REF | 70% |
| 963 | s7 | SNP | 65% |
| 964 | s7 | SNP | 65% |
| 965 | s7 | REF | 70% |
| 966 | s7 | REF | 75% |
| 967 | s7 | SNP | 70% |
| 968 | s7 | REF | 70% |
| 969 | s7 | REF | 70% |
| 970 | s7 | SNP | 70% |
| 971 | s7 | REF | 75% |
| 972 | s7 | SNP | 65% |
| 973 | s7 | SNP | 65% |
| 974 | s7 | REF | 70% |
| 975 | s7 | REF | 70% |
| 976 | s7 | SNP | 65% |
| 977 | s7 | REF | 70% |
| 978 | s7 | REF | 70% |
| 979 | s7 | SNP | 65% |
| 980 | s7 | SNP | 65% |
| 981 | s8 | SNP | 65% |
| 982 | s8 | REF | 65% |
| 983 | s8 | REF | 65% |
| 984 | s8 | SNP | 65% |
| 985 | s8 | REF | 55% |
| 986 | s8 | SNP | 55% |
| 987 | s8 | SNP | 70% |
| 988 | s8 | REF | 70% |
| 989 | s8 | REF | 70% |
| 990 | s8 | SNP | 70% |
| 991 | s8 | REF | 70% |
| 992 | s8 | SNP | 70% |
| 993 | s8 | REF | 55% |
| 994 | s8 | SNP | 55% |
| 995 | s8 | REF | 55% |
| 996 | s8 | SNP | 55% |
| 997 | s8 | REF | 70% |
| 998 | s8 | SNP | 70% |
| 999 | s8 | REF | 65% |
| 1000 | s8 | SNP | 50% |
| 1001 | s8 | SNP | 70% |
| 1002 | s8 | REF | 70% |
| 1003 | s8 | REF | 50% |
| 1004 | s8 | SNP | 50% |
| 1005 | s8 | SNP | 55% |
| 1006 | s8 | REF | 55% |
| 1007 | s8 | SNP | 65% |
| 1008 | s8 | REF | 70% |
| 1009 | s8 | SNP | 70% |
| 1010 | s8 | REF | 70% |
| 1011 | s8 | SNP | 50% |
| 1012 | s8 | REF | 50% |
| 1013 | s8 | SNP | 60% |
| 1014 | s8 | REF | 60% |
| 1015 | s8 | SNP | 50% |
| 1016 | s8 | REF | 50% |
| 1017 | s8 | SNP | 70% |
| 1018 | s8 | REF | 70% |
| 1019 | s8 | SNP | 70% |
| 1020 | s8 | REF | 50% |
| 1021 | s8 | SNP | 65% |
| 1022 | s8 | REF | 65% |
| 1023 | s8 | SNP | 70% |
| 1024 | s8 | REF | 70% |
| 1025 | s8 | REF | 50% |
| 1026 | s8 | SNP | 50% |
| 1027 | s8 | SNP | 70% |
| 1028 | s8 | REF | 70% |
| 1029 | s8 | REF | 50% |
| 1030 | s8 | SNP | 50% |
| 1031 | s8 | REF | 50% |
| 1032 | s8 | SNP | 70% |
| 1033 | s8 | REF | 70% |
| 1034 | s8 | REF | 60% |
| 1035 | s8 | SNP | 60% |
| 1036 | s8 | REF | 50% |
| 1037 | s8 | SNP | 50% |
| 1038 | s8 | REF | 45% |
| 1039 | s8 | SNP | 45% |
| 1040 | s8 | REF | 45% |
| 1041 | s8 | SNP | 45% |
| 1042 | s8 | SNP | 45% |
| 1043 | s8 | REF | 45% |
| 1044 | s8 | SNP | 55% |
| 1045 | s8 | REF | 55% |
| 1046 | s8 | SNP | 70% |
| 1047 | s8 | REF | 70% |
| 1048 | s8 | SNP | 50% |
| 1049 | s8 | REF | 50% |
| 1050 | s9 | SNP | 35% |
| 1051 | s9 | REF | 40% |
| 1052 | s9 | SNP | 40% |
| 1053 | s9 | REF | 45% |
| 1054 | s9 | REF | 45% |
| 1055 | s9 | SNP | 40% |
| 1056 | s9 | SNP | 40% |
| 1057 | s9 | REF | 45% |
| 1058 | s9 | REF | 45% |
| 1059 | s9 | SNP | 40% |
| 1060 | s9 | REF | 40% |
| 1061 | s9 | REF | 45% |
| 1062 | s9 | REF | 40% |
| 1063 | s9 | SNP | 35% |
| 1064 | s9 | REF | 50% |
| 1065 | s9 | SNP | 45% |
| 1066 | s9 | SNP | 45% |
| 1067 | s9 | REF | 50% |
| 1068 | s9 | REF | 50% |
| 1069 | s9 | SNP | 45% |
| 1070 | s9 | SNP | 45% |
| 1071 | s9 | REF | 50% |
| 1072 | s9 | REF | 45% |
| 1073 | s9 | SNP | 40% |
| 1074 | s9 | REF | 45% |
| 1075 | s9 | REF | 60% |
| 1076 | s9 | SNP | 55% |
| 1077 | s9 | REF | 55% |
| 1078 | s9 | SNP | 50% |
| 1079 | s9 | REF | 55% |
| 1080 | s9 | SNP | 50% |
| 1081 | s9 | REF | 50% |
| 1082 | s9 | SNP | 45% |
| 1083 | s9 | REF | 50% |
| 1084 | s9 | SNP | 45% |
| 1085 | s9 | SNP | 35% |
| 1086 | s9 | REF | 40% |
| 1087 | s9 | REF | 45% |
| 1088 | s9 | SNP | 45% |
| 1089 | s9 | REF | 50% |
| 1090 | s9 | REF | 50% |
| 1091 | s9 | SNP | 45% |
| 1092 | s9 | SNP | 40% |
| 1093 | s9 | REF | 45% |
| 1094 | s9 | REF | 45% |
| 1095 | s9 | SNP | 40% |
| 1096 | s9 | SNP | 40% |
| 1097 | s9 | REF | 50% |
| 1098 | s9 | SNP | 45% |
| 1099 | s9 | REF | 55% |
| 1100 | s10 | REF | 60% |
| 1101 | s10 | SNP | 55% |
| 1102 | s10 | SNP | 65% |
| 1103 | s10 | REF | 70% |
| 1104 | s10 | REF | 55% |
| 1105 | s10 | SNP | 50% |
| 1106 | s10 | REF | 65% |
| 1107 | s10 | SNP | 60% |
| 1108 | s10 | SNP | 55% |
| 1109 | s10 | REF | 60% |
| 1110 | s10 | SNP | 65% |
| 1111 | s10 | REF | 70% |
| 1112 | s10 | REF | 60% |
| 1113 | s10 | SNP | 55% |
| 1114 | s10 | REF | 70% |
| 1115 | s10 | SNP | 65% |
| 1116 | s10 | SNP | 60% |
| 1117 | s10 | REF | 65% |
| 1118 | s10 | REF | 65% |
| 1119 | s10 | SNP | 65% |
| 1120 | s10 | REF | 70% |
| 1121 | s10 | SNP | 60% |
| 1122 | s10 | REF | 65% |
| 1123 | s10 | SNP | 65% |
| 1124 | s10 | REF | 70% |
| 1125 | s10 | SNP | 60% |
| 1126 | s10 | REF | 65% |
| 1127 | s10 | SNP | 55% |
| 1128 | s10 | REF | 60% |
| 1129 | s10 | REF | 60% |
| 1130 | s10 | SNP | 55% |
| 1131 | s10 | REF | 60% |
| 1132 | s10 | SNP | 55% |
| 1133 | s10 | SNP | 65% |
| 1134 | s10 | REF | 70% |
| 1135 | s10 | REF | 70% |
| 1136 | s10 | SNP | 65% |
| 1137 | s10 | REF | 70% |
| 1138 | s10 | SNP | 65% |
| 1139 | s10 | SNP | 65% |
| 1140 | s10 | REF | 70% |
| 1141 | s10 | REF | 70% |
| 1142 | s10 | SNP | 65% |
| 1143 | s10 | SNP | 55% |
| 1144 | s10 | REF | 60% |
| 1145 | s10 | SNP | 60% |
| 1146 | s10 | SNP | 55% |
| 1147 | s10 | REF | 60% |
| 1148 | s10 | SNP | 55% |
| 1149 | s10 | REF | 60% |
| 1150 | s10 | SNP | 60% |
| 1151 | s10 | SNP | 60% |
| 1152 | s10 | SNP | 60% |
| 1153 | s10 | REF | 65% |
| 1154 | s10 | SNP | 50% |
| 1155 | s10 | REF | 55% |
| 1156 | s10 | REF | 65% |
| 1157 | s10 | SNP | 50% |
| 1158 | s10 | REF | 55% |
| 1159 | s10 | SNP | 55% |
| 1160 | s10 | REF | 60% |
| 1161 | s11 | SNP | 60% |
| 1162 | s11 | REF | 55% |
| 1163 | s11 | SNP | 60% |
| 1164 | s11 | REF | 55% |
| 1165 | s11 | SNP | 60% |
| 1166 | s11 | REF | 55% |
| 1167 | s11 | REF | 60% |
| 1168 | s11 | SNP | 65% |
| 1169 | s11 | SNP | 70% |
| 1170 | s11 | SNP | 65% |
| 1171 | s11 | REF | 60% |
| 1172 | s11 | SNP | 65% |
| 1173 | s11 | REF | 60% |
| 1174 | s11 | REF | 65% |
| 1175 | s11 | SNP | 70% |
| 1176 | s11 | REF | 55% |
| 1177 | s11 | SNP | 60% |
| 1178 | s11 | SNP | 65% |
| 1179 | s11 | REF | 60% |
| 1180 | s11 | REF | 55% |
| 1181 | s11 | SNP | 65% |
| 1182 | s11 | SNP | 65% |
| 1183 | s11 | REF | 60% |
| 1184 | s11 | SNP | 65% |
| 1185 | s11 | REF | 60% |
| 1186 | s11 | REF | 60% |
| 1187 | s11 | SNP | 65% |
| 1188 | s11 | SNP | 65% |
| 1189 | s11 | REF | 60% |
| 1190 | s11 | REF | 60% |
| 1191 | s11 | SNP | 65% |
| 1192 | s11 | SNP | 65% |
| 1193 | s11 | REF | 60% |
| 1194 | s11 | SNP | 65% |
| 1195 | s11 | REF | 60% |
| 1196 | s11 | SNP | 65% |
| 1197 | s11 | REF | 60% |
| 1198 | s11 | SNP | 65% |
| 1199 | s11 | REF | 60% |
| 1200 | s11 | REF | 65% |
| 1201 | s11 | SNP | 70% |
| 1202 | s11 | SNP | 70% |
| 1203 | s11 | REF | 60% |
| 1204 | s11 | REF | 60% |
| 1205 | s11 | SNP | 65% |
| 1206 | s11 | REF | 65% |
| 1207 | s11 | REF | 60% |
| 1208 | s11 | SNP | 65% |
| 1209 | s11 | REF | 55% |
| 1210 | s11 | SNP | 60% |
| 1211 | s11 | SNP | 65% |
| 1212 | s11 | REF | 65% |
| 1213 | s11 | REF | 55% |
| 1214 | s11 | SNP | 60% |
| 1215 | s11 | REF | 60% |
| 1216 | s11 | SNP | 65% |
| 1217 | s11 | SNP | 70% |
| 1218 | s11 | REF | 65% |
| 1219 | s11 | SNP | 65% |
| 1220 | s11 | REF | 60% |
| 1221 | s11 | REF | 60% |
| 1222 | s11 | SNP | 65% |
| 1223 | s11 | REF | 60% |
| 1224 | s12 | SNP | 30% |
| 1225 | s12 | SNP | 35% |
| 1226 | s12 | SNP | 65% |
| 1227 | s12 | REF | 70% |
| 1228 | s12 | SNP | 40% |
| 1229 | s12 | SNP | 55% |
| 1230 | s12 | SNP | 70% |
| 1231 | s12 | SNP | 70% |
| 1232 | s12 | REF | 75% |
| 1233 | s12 | SNP | 40% |
| 1234 | s12 | SNP | 60% |
| 1235 | s12 | REF | 65% |
| 1236 | s12 | SNP | 55% |
| 1237 | s12 | SNP | 60% |
| 1238 | s12 | REF | 65% |
| 1239 | s12 | SNP | 60% |
| 1240 | s12 | SNP | 60% |
| 1241 | s12 | REF | 75% |
| 1242 | s12 | REF | 75% |
| 1243 | s12 | SNP | 70% |
| 1244 | s12 | REF | 75% |
| 1245 | s12 | SNP | 70% |
| 1246 | s12 | SNP | 30% |
| 1247 | s12 | SNP | 70% |
| 1248 | s12 | SNP | 65% |
| 1249 | s12 | REF | 75% |
| 1250 | s12 | REF | 75% |
| 1251 | s12 | SNP | 70% |
| 1252 | s12 | SNP | 35% |
| 1253 | s12 | REF | 75% |
| 1254 | s12 | SNP | 40% |
| 1255 | s12 | SNP | 50% |
| 1256 | s12 | SNP | 50% |
| 1257 | s12 | SNP | 45% |
| 1258 | s12 | SNP | 40% |
| 1259 | s12 | SNP | 40% |
| 1260 | s12 | REF | 75% |
| 1261 | s12 | SNP | 70% |
| 1262 | s12 | SNP | 45% |
| 1263 | s12 | SNP | 65% |
| 1264 | s12 | SNP | 40% |
| 1265 | s12 | SNP | 40% |
| 1266 | s12 | SNP | 40% |
| 1267 | s13 | REF | 55% |
| 1268 | s13 | REF | 60% |
| 1269 | s13 | REF | 55% |
| 1270 | s13 | REF | 50% |
| 1271 | s13 | REF | 50% |
| 1272 | s13 | REF | 45% |
| 1273 | s14 | REF | 60% |
| 1274 | s14 | SNP | 60% |
| 1275 | s14 | SNP | 65% |
| 1276 | s14 | REF | 65% |
| 1277 | s14 | REF | 60% |
| 1278 | s14 | SNP | 60% |
| 1279 | s14 | SNP | 60% |
| 1280 | s14 | REF | 60% |
| 1281 | s14 | SNP | 65% |
| 1282 | s14 | REF | 65% |
| 1283 | s14 | REF | 60% |
| 1284 | s14 | SNP | 60% |
| 1285 | s14 | REF | 60% |
| 1286 | s14 | SNP | 60% |
| 1287 | s14 | SNP | 55% |
| 1288 | s14 | REF | 55% |
| 1289 | s14 | SNP | 65% |
| 1290 | s14 | REF | 65% |
| 1291 | s14 | REF | 65% |
| 1292 | s14 | SNP | 65% |
| 1293 | s14 | SNP | 65% |
| 1294 | s14 | REF | 65% |
| 1295 | s14 | REF | 60% |
| 1296 | s14 | SNP | 60% |
| 1297 | s14 | REF | 55% |
| 1298 | s14 | SNP | 70% |
| 1299 | s14 | REF | 70% |
| 1300 | s14 | REF | 60% |
| 1301 | s14 | REF | 65% |
| 1302 | s14 | SNP | 65% |
| 1303 | s14 | SNP | 60% |
| 1304 | s14 | REF | 60% |
| 1305 | s14 | SNP | 60% |
| 1306 | s14 | REF | 70% |
| 1307 | s14 | SNP | 70% |
| 1308 | s14 | SNP | 60% |
| 1309 | s14 | SNP | 60% |
| 1310 | s14 | REF | 60% |
| 1311 | s14 | REF | 60% |
| 1312 | s14 | SNP | 60% |
| 1313 | s14 | SNP | 60% |
| 1314 | s14 | REF | 60% |
| 1315 | s14 | REF | 60% |
| 1316 | s14 | SNP | 60% |
| 1317 | s14 | SNP | 55% |
| 1318 | s14 | SNP | 65% |
| 1319 | s14 | REF | 65% |
| 1320 | s14 | SNP | 60% |
| 1321 | s14 | SNP | 65% |
| 1322 | s14 | REF | 65% |
| 1323 | s14 | REF | 60% |
| 1324 | s14 | REF | 60% |
| 1325 | s14 | REF | 65% |
| 1326 | s14 | SNP | 65% |
| 1327 | s14 | REF | 65% |
| 1328 | s14 | SNP | 65% |
| 1329 | s14 | REF | 65% |
| 1330 | s14 | SNP | 65% |
| 1331 | s14 | REF | 60% |
| 1332 | s14 | SNP | 60% |
| 1333 | s14 | SNP | 65% |
| 1334 | s14 | REF | 65% |
| 1335 | s14 | REF | 65% |
| 1336 | s14 | SNP | 65% |
| 1337 | s14 | REF | 65% |
| 1338 | s14 | SNP | 65% |
| 1339 | s14 | REF | 55% |
| 1340 | s14 | SNP | 55% |
| 1341 | s14 | SNP | 65% |
| 1342 | s14 | REF | 65% |
| 1343 | s14 | SNP | 60% |
| 1344 | s14 | REF | 60% |
| 1345 | s14 | REF | 65% |
| 1346 | s14 | SNP | 65% |
| 1347 | s14 | SNP | 60% |
| 1348 | s14 | REF | 60% |
| 1349 | s14 | SNP | 60% |
| 1350 | s14 | REF | 60% |
| 1351 | s14 | SNP | 55% |
| 1352 | s14 | REF | 55% |
| 1353 | s15 | REF | 30% |
| 1354 | s15 | SNP | 35% |
| 1355 | s15 | REF | 40% |
| 1356 | s15 | REF | 35% |
| 1357 | s15 | REF | 35% |
| 1358 | s15 | SNP | 30% |
| 1359 | s15 | SNP | 35% |
| 1360 | s15 | REF | 40% |
| 1361 | s15 | SNP | 35% |
| 1362 | s15 | REF | 40% |
| 1363 | s15 | REF | 30% |
| 1364 | s15 | REF | 30% |
| 1365 | s15 | REF | 40% |
| 1366 | s15 | SNP | 35% |
| 1367 | s15 | SNP | 30% |
| 1368 | s15 | REF | 35% |
| 1369 | s15 | REF | 35% |
| 1370 | s15 | REF | 30% |
| 1371 | s15 | REF | 50% |
| 1372 | s15 | REF | 30% |
| 1373 | s15 | REF | 35% |
| 1374 | s15 | SNP | 30% |
| 1375 | s15 | REF | 40% |
| 1376 | s15 | REF | 40% |
| 1377 | s15 | SNP | 35% |
| 1378 | s15 | REF | 40% |
| 1379 | s15 | SNP | 35% |
| 1380 | s15 | REF | 40% |
| 1381 | s15 | SNP | 40% |
| 1382 | s15 | REF | 45% |
| 1383 | s15 | SNP | 35% |
| 1384 | s15 | REF | 40% |
| 1385 | s15 | REF | 50% |
| 1386 | s15 | REF | 30% |
| 1387 | s15 | REF | 35% |
| 1388 | s15 | SNP | 30% |
| 1389 | s15 | SNP | 45% |
| 1390 | s15 | SNP | 30% |
| 1391 | s15 | REF | 35% |
| 1392 | s15 | REF | 45% |
| 1393 | s15 | REF | 40% |
| 1394 | s15 | SNP | 35% |
| 1395 | s15 | REF | 40% |
| 1396 | s15 | SNP | 35% |
| 1397 | s15 | SNP | 30% |
| 1398 | s15 | REF | 35% |
| 1399 | s15 | SNP | 40% |
| 1400 | s15 | REF | 40% |
| 1401 | s15 | SNP | 35% |
| 1402 | s15 | REF | 40% |
| 1403 | s15 | SNP | 35% |
| 1404 | s16 | REF | 40% |
| 1405 | s16 | SNP | 45% |
| 1406 | s16 | REF | 40% |
| 1407 | s16 | REF | 45% |
| 1408 | s16 | SNP | 50% |
| 1409 | s16 | REF | 45% |
| 1410 | s16 | SNP | 50% |
| 1411 | s16 | SNP | 50% |
| 1412 | s16 | REF | 45% |
| 1413 | s16 | REF | 45% |
| 1414 | s16 | SNP | 50% |
| 1415 | s16 | SNP | 45% |
| 1416 | s16 | REF | 40% |
| 1417 | s16 | REF | 40% |
| 1418 | s16 | SNP | 45% |
| 1419 | s16 | SNP | 45% |
| 1420 | s16 | REF | 40% |
| 1421 | s16 | REF | 45% |
| 1422 | s16 | SNP | 50% |
| 1423 | s16 | REF | 45% |
| 1424 | s16 | REF | 45% |
| 1425 | s16 | SNP | 50% |
| 1426 | s16 | REF | 40% |
| 1427 | s16 | SNP | 45% |
| 1428 | s16 | REF | 45% |
| 1429 | s16 | SNP | 50% |
| 1430 | s16 | SNP | 50% |
| 1431 | s16 | REF | 45% |
| 1432 | s16 | SNP | 50% |
| 1433 | s16 | SNP | 60% |
| 1434 | s16 | SNP | 55% |
| 1435 | s16 | REF | 50% |
| 1436 | s16 | REF | 45% |
| 1437 | s16 | SNP | 50% |
| 1438 | s16 | SNP | 50% |
| 1439 | s16 | REF | 45% |
| 1440 | s16 | SNP | 45% |
| 1441 | s16 | SNP | 50% |
| 1442 | s16 | REF | 45% |
| 1443 | s16 | REF | 45% |
| 1444 | s16 | SNP | 50% |
| 1445 | s16 | REF | 50% |
| 1446 | s16 | SNP | 55% |
| 1447 | s16 | REF | 50% |
| 1448 | s16 | SNP | 55% |
| 1449 | s16 | REF | 55% |
| 1450 | s16 | SNP | 60% |
| 1451 | s16 | SNP | 50% |
| 1452 | s16 | REF | 45% |
| 1453 | s16 | SNP | 50% |
| 1454 | s16 | REF | 45% |
| 1455 | s16 | SNP | 45% |
| 1456 | s16 | REF | 40% |
| 1457 | s16 | REF | 40% |
| 1458 | s16 | SNP | 45% |
| 1459 | s16 | SNP | 45% |
| 1460 | s16 | REF | 40% |
| 1461 | s16 | SNP | 45% |
| 1462 | s16 | REF | 40% |
| 1463 | s16 | SNP | 45% |
| 1464 | s16 | REF | 40% |
| 1465 | s16 | REF | 40% |
| 1466 | s16 | REF | 40% |
| 1467 | s16 | SNP | 45% |
| 1468 | s16 | SNP | 45% |
| 1469 | s16 | SNP | 55% |
| 1470 | s16 | SNP | 50% |
| 1471 | s16 | REF | 45% |
| 1472 | s16 | SNP | 45% |
| 1473 | s16 | REF | 40% |
| 1474 | s16 | REF | 55% |
| 1475 | s16 | SNP | 45% |
| 1476 | s16 | REF | 40% |
| 1477 | s16 | SNP | 50% |
| 1478 | s16 | REF | 45% |
| 1479 | s16 | REF | 40% |
| 1480 | s16 | SNP | 45% |
| 1481 | s16 | SNP | 50% |
| 1482 | s16 | REF | 50% |
| 1483 | s16 | REF | 45% |
| 1484 | s17 | SNP | 45% |
| 1485 | s17 | REF | 40% |
| 1486 | s17 | REF | 45% |
| 1487 | s17 | REF | 30% |
| 1488 | s17 | SNP | 35% |
| 1489 | s17 | SNP | 50% |
| 1490 | s17 | REF | 35% |
| 1491 | s17 | SNP | 55% |
| 1492 | s17 | REF | 40% |
| 1493 | s17 | REF | 45% |
| 1494 | s17 | SNP | 50% |
| 1495 | s17 | REF | 45% |
| 1496 | s17 | SNP | 40% |
| 1497 | s17 | REF | 35% |
| 1498 | s17 | REF | 45% |
| 1499 | s17 | SNP | 50% |
| 1500 | s17 | REF | 50% |
| 1501 | s17 | SNP | 55% |
| 1502 | s17 | SNP | 45% |
| 1503 | s17 | REF | 40% |
| 1504 | s17 | SNP | 50% |
| 1505 | s17 | REF | 45% |
| 1506 | s17 | REF | 35% |
| 1507 | s17 | SNP | 40% |
| 1508 | s17 | SNP | 50% |
| 1509 | s17 | REF | 45% |
| 1510 | s17 | SNP | 40% |
| 1511 | s17 | REF | 35% |
| 1512 | s17 | SNP | 50% |
| 1513 | s17 | SNP | 50% |
| 1514 | s17 | REF | 30% |
| 1515 | s17 | SNP | 35% |
| 1516 | s17 | REF | 45% |
| 1517 | s17 | SNP | 50% |
| 1518 | s17 | REF | 45% |
| 1519 | s17 | SNP | 50% |
| 1520 | s17 | SNP | 50% |
| 1521 | s17 | REF | 40% |
| 1522 | s17 | REF | 35% |
| 1523 | s17 | SNP | 45% |
| 1524 | s17 | REF | 30% |
| 1525 | s17 | REF | 35% |
| 1526 | s17 | SNP | 40% |
| 1527 | s17 | SNP | 30% |
| 1528 | s18 | REF | 40% |
| 1529 | s18 | REF | 40% |
| 1530 | s18 | SNP | 45% |
| 1531 | s18 | REF | 40% |
| 1532 | s18 | SNP | 40% |
| 1533 | s18 | SNP | 45% |
| 1534 | s18 | REF | 40% |
| 1535 | s18 | REF | 30% |
| 1536 | s18 | SNP | 35% |
| 1537 | s18 | SNP | 45% |
| 1538 | s18 | SNP | 30% |
| 1539 | s18 | SNP | 35% |
| 1540 | s18 | REF | 30% |
| 1541 | s18 | SNP | 45% |
| 1542 | s18 | REF | 40% |
| 1543 | s18 | SNP | 35% |
| 1544 | s18 | SNP | 40% |
| 1545 | s18 | REF | 35% |
| 1546 | s18 | REF | 35% |
| 1547 | s18 | SNP | 40% |
| 1548 | s18 | SNP | 35% |
| 1549 | s18 | REF | 40% |
| 1550 | s18 | SNP | 45% |
| 1551 | s18 | SNP | 45% |
| 1552 | s18 | REF | 35% |
| 1553 | s18 | SNP | 40% |
| 1554 | s18 | REF | 35% |
| 1555 | s18 | SNP | 45% |
| 1556 | s18 | REF | 40% |
| 1557 | s18 | SNP | 35% |
| 1558 | s18 | REF | 30% |
| 1559 | s18 | REF | 40% |
| 1560 | s18 | SNP | 35% |
| 1561 | s18 | SNP | 35% |
| 1562 | s18 | REF | 35% |
| 1563 | s18 | SNP | 40% |
| 1564 | s18 | SNP | 45% |
| 1565 | s18 | SNP | 40% |
| 1566 | s18 | REF | 35% |
| 1567 | s18 | REF | 30% |
| 1568 | s18 | SNP | 35% |
| 1569 | s18 | SNP | 30% |
| 1570 | s18 | REF | 30% |
| 1571 | s18 | SNP | 35% |
| 1572 | s18 | REF | 30% |
| 1573 | s18 | REF | 30% |
| 1574 | s19 | REF | 50% |
| 1575 | s19 | SNP | 55% |
| 1576 | s19 | REF | 55% |
| 1577 | s19 | SNP | 60% |
| 1578 | s19 | SNP | 60% |
| 1579 | s19 | REF | 55% |
| 1580 | s19 | SNP | 55% |
| 1581 | s19 | REF | 50% |
| 1582 | s19 | REF | 55% |
| 1583 | s19 | SNP | 60% |
| 1584 | s19 | REF | 55% |
| 1585 | s19 | SNP | 60% |
| 1586 | s19 | SNP | 55% |
| 1587 | s19 | REF | 50% |
| 1588 | s19 | REF | 45% |
| 1589 | s19 | SNP | 50% |
| 1590 | s19 | SNP | 50% |
| 1591 | s19 | SNP | 55% |
| 1592 | s19 | REF | 50% |
| 1593 | s19 | SNP | 60% |
| 1594 | s19 | REF | 55% |
| 1595 | s19 | SNP | 60% |
| 1596 | s19 | REF | 55% |
| 1597 | s19 | SNP | 65% |
| 1598 | s19 | REF | 60% |
| 1599 | s19 | SNP | 60% |
| 1600 | s19 | REF | 55% |
| 1601 | s19 | REF | 55% |
| 1602 | s19 | SNP | 60% |
| 1603 | s19 | REF | 55% |
| 1604 | s19 | SNP | 60% |
| 1605 | s19 | SNP | 55% |
| 1606 | s19 | REF | 50% |
| 1607 | s19 | REF | 55% |
| 1608 | s19 | SNP | 60% |
| 1609 | s19 | REF | 55% |
| 1610 | s19 | SNP | 60% |
| 1611 | s19 | SNP | 60% |
| 1612 | s19 | REF | 55% |
| 1613 | s19 | SNP | 50% |
| 1614 | s19 | REF | 55% |
| 1615 | s19 | SNP | 60% |
| 1616 | s19 | SNP | 60% |
| 1617 | s19 | REF | 55% |
| 1618 | s19 | SNP | 60% |
| 1619 | s19 | REF | 55% |
| 1620 | s19 | REF | 45% |
| 1621 | s19 | SNP | 60% |
| 1622 | s19 | REF | 55% |
| 1623 | s19 | REF | 50% |
| 1624 | s19 | REF | 45% |
| 1625 | s19 | REF | 50% |
| 1626 | s19 | SNP | 55% |
| 1627 | s19 | SNP | 60% |
| 1628 | s19 | REF | 55% |
| 1629 | s19 | SNP | 55% |
| 1630 | s19 | SNP | 55% |
| 1631 | s19 | REF | 50% |
| 1632 | s19 | SNP | 55% |
| 1633 | s19 | REF | 50% |
| 1634 | s20 | SNP | 45% |
| 1635 | s20 | REF | 50% |
| 1636 | s20 | REF | 45% |
| 1637 | s20 | SNP | 40% |
| 1638 | s20 | SNP | 40% |
| 1639 | s20 | SNP | 40% |
| 1640 | s20 | REF | 45% |
| 1641 | s20 | SNP | 45% |
| 1642 | s20 | REF | 50% |
| 1643 | s20 | SNP | 40% |
| 1644 | s20 | REF | 45% |
| 1645 | s20 | REF | 50% |
| 1646 | s20 | SNP | 45% |
| 1647 | s20 | SNP | 40% |
| 1648 | s20 | REF | 45% |
| 1649 | s20 | REF | 50% |
| 1650 | s20 | REF | 45% |
| 1651 | s20 | SNP | 40% |
| 1652 | s20 | REF | 50% |
| 1653 | s20 | SNP | 45% |
| 1654 | s20 | REF | 45% |
| 1655 | s20 | SNP | 40% |
| 1656 | s20 | REF | 50% |
| 1657 | s20 | REF | 50% |
| 1658 | s20 | SNP | 45% |
| 1659 | s20 | REF | 50% |
| 1660 | s20 | REF | 50% |
| 1661 | s20 | REF | 50% |
| 1662 | s20 | SNP | 45% |
| 1663 | s20 | REF | 50% |
| 1664 | s20 | SNP | 45% |
| 1665 | s20 | SNP | 40% |
| 1666 | s20 | REF | 50% |
| 1667 | s20 | SNP | 45% |
| 1668 | s20 | REF | 45% |
| 1669 | s20 | REF | 50% |
| 1670 | s20 | SNP | 45% |
| 1671 | s20 | REF | 50% |
| 1672 | s20 | SNP | 45% |
| 1673 | s20 | REF | 50% |
| 1674 | s20 | REF | 45% |
| 1675 | s20 | REF | 50% |
| 1676 | s20 | SNP | 45% |
| 1677 | s20 | REF | 50% |
| 1678 | s20 | REF | 50% |
| 1679 | s20 | REF | 50% |
| 1680 | s20 | SNP | 45% |
| 1681 | s20 | REF | 50% |
| 1682 | s20 | SNP | 45% |
| 1683 | s20 | REF | 50% |
| 1684 | s20 | SNP | 45% |
| 1685 | s20 | REF | 50% |
| 1686 | s20 | SNP | 40% |
| 1687 | s20 | REF | 45% |
| 1688 | s20 | REF | 50% |
| 1689 | s20 | SNP | 45% |
| 1690 | s20 | SNP | 45% |
| 1691 | s20 | REF | 50% |
| 1692 | s20 | REF | 45% |
| 1693 | s20 | SNP | 40% |
| 1694 | s20 | SNP | 45% |
| 1695 | s20 | REF | 50% |
| 1696 | s20 | REF | 50% |
| 1697 | s20 | SNP | 45% |
| 1698 | s20 | REF | 45% |
| 1699 | s20 | SNP | 40% |
| 1700 | s20 | REF | 45% |
| 1701 | s20 | SNP | 40% |
| 1702 | s21 | SNP | 40% |
| 1703 | s21 | SNP | 35% |
| 1704 | s21 | REF | 35% |
| 1705 | s21 | SNP | 40% |
| 1706 | s21 | SNP | 40% |
| 1707 | s21 | SNP | 40% |
| 1708 | s21 | SNP | 40% |
| 1709 | s21 | SNP | 35% |
| 1710 | s21 | SNP | 40% |
| 1711 | s21 | REF | 35% |
| 1712 | s21 | SNP | 40% |
| 1713 | s21 | SNP | 35% |
| 1714 | s21 | SNP | 40% |
| 1715 | s21 | REF | 35% |
| 1716 | s21 | SNP | 40% |
| 1717 | s21 | REF | 35% |
| 1718 | s21 | SNP | 40% |
| 1719 | s21 | REF | 35% |
| 1720 | s21 | SNP | 40% |
| 1721 | s22 | SNP | 35% |
| 1722 | s22 | SNP | 40% |
| 1723 | s22 | SNP | 40% |
| 1724 | s22 | SNP | 45% |
| 1725 | s22 | REF | 45% |
| 1726 | s22 | SNP | 50% |
| 1727 | s22 | SNP | 40% |
| 1728 | s22 | REF | 35% |
| 1729 | s22 | SNP | 45% |
| 1730 | s22 | REF | 40% |
| 1731 | s22 | SNP | 40% |
| 1732 | s22 | SNP | 45% |
| 1733 | s22 | SNP | 50% |
| 1734 | s22 | REF | 45% |
| 1735 | s22 | SNP | 50% |
| 1736 | s22 | REF | 45% |
| 1737 | s22 | SNP | 50% |
| 1738 | s22 | REF | 45% |
| 1739 | s22 | SNP | 50% |
| 1740 | s22 | SNP | 40% |
| 1741 | s22 | REF | 35% |
| 1742 | s22 | REF | 45% |
| 1743 | s22 | SNP | 45% |
| 1744 | s22 | REF | 40% |
| 1745 | s23 | REF | 55% |
| 1746 | s23 | REF | 60% |
| 1747 | s23 | REF | 55% |
| 1748 | s23 | SNP | 60% |
| 1749 | s23 | SNP | 65% |
| 1750 | s23 | REF | 65% |
| 1751 | s23 | SNP | 70% |
| 1752 | s23 | REF | 60% |
| 1753 | s23 | SNP | 70% |
| 1754 | s23 | REF | 65% |
| 1755 | s23 | SNP | 60% |
| 1756 | s23 | REF | 65% |
| 1757 | s23 | SNP | 70% |
| 1758 | s23 | REF | 60% |
| 1759 | s23 | SNP | 65% |
| 1760 | s23 | SNP | 65% |
| 1761 | s23 | REF | 60% |
| 1762 | s23 | REF | 55% |
| 1763 | s23 | REF | 65% |
| 1764 | s23 | SNP | 70% |
| 1765 | s23 | SNP | 75% |
| 1766 | s23 | REF | 70% |
| 1767 | s23 | SNP | 70% |
| 1768 | s23 | REF | 65% |
| 1769 | s23 | SNP | 70% |
| 1770 | s23 | REF | 65% |
| 1771 | s23 | SNP | 70% |
| 1772 | s23 | REF | 65% |
| 1773 | s23 | SNP | 70% |
| 1774 | s23 | REF | 65% |
| 1775 | s23 | SNP | 65% |
| 1776 | s23 | REF | 65% |
| 1777 | s23 | SNP | 70% |
| 1778 | s23 | REF | 65% |
| 1779 | s23 | REF | 65% |
| 1780 | s23 | SNP | 70% |
| 1781 | s23 | REF | 60% |
| 1782 | s23 | REF | 60% |
| 1783 | s23 | SNP | 65% |
| 1784 | s23 | REF | 60% |
| 1785 | s23 | REF | 65% |
| 1786 | s23 | SNP | 70% |
| 1787 | s23 | SNP | 60% |
| 1788 | s23 | SNP | 65% |
| 1789 | s23 | SNP | 70% |
| 1790 | s23 | REF | 65% |
| 1791 | s23 | REF | 60% |
| 1792 | s23 | REF | 60% |
| 1793 | s23 | REF | 60% |
| 1794 | s23 | SNP | 65% |
| 1795 | s23 | SNP | 70% |
| 1796 | s23 | REF | 65% |
| 1797 | s23 | SNP | 65% |
| 1798 | s23 | REF | 60% |
| 1799 | s23 | SNP | 65% |
| 1800 | s23 | REF | 55% |
| 1801 | s23 | REF | 60% |
| 1802 | s23 | SNP | 65% |
| 1803 | s24 | REF | 65% |
| 1804 | s24 | REF | 60% |
| 1805 | s24 | SNP | 60% |
| 1806 | s24 | REF | 65% |
| 1807 | s24 | SNP | 65% |
| 1808 | s24 | REF | 60% |
| 1809 | s24 | REF | 55% |
| 1810 | s24 | SNP | 55% |
| 1811 | s24 | REF | 65% |
| 1812 | s24 | REF | 65% |
| 1813 | s24 | SNP | 55% |
| 1814 | s24 | REF | 55% |
| 1815 | s24 | REF | 60% |
| 1816 | s24 | SNP | 60% |
| 1817 | s24 | SNP | 60% |
| 1818 | s24 | REF | 60% |
| 1819 | s24 | REF | 60% |
| 1820 | s24 | SNP | 60% |
| 1821 | s24 | REF | 70% |
| 1822 | s25 | SNP | 80% |
| 1823 | s25 | REF | 75% |
| 1824 | s25 | SNP | 75% |
| 1825 | s25 | REF | 70% |
| 1826 | s25 | REF | 70% |
| 1827 | s25 | SNP | 75% |
| 1828 | s25 | REF | 75% |
| 1829 | s25 | REF | 75% |
| 1830 | s25 | SNP | 80% |
| 1831 | s25 | SNP | 80% |
| 1832 | s25 | REF | 75% |
| 1833 | s25 | SNP | 80% |
| 1834 | s25 | REF | 80% |
| 1835 | s25 | SNP | 80% |
| 1836 | s25 | REF | 75% |
| 1837 | s25 | REF | 80% |
| 1838 | s25 | SNP | 80% |
| 1839 | s25 | REF | 75% |
| 1840 | s25 | SNP | 80% |
| 1841 | s25 | REF | 75% |
| 1842 | s25 | SNP | 80% |
| 1843 | s25 | REF | 75% |
| 1844 | s25 | REF | 75% |
| 1845 | s25 | SNP | 80% |
| 1846 | s25 | SNP | 80% |
| 1847 | s25 | REF | 75% |
| 1848 | s25 | SNP | 80% |
| 1849 | s25 | REF | 75% |
| 1850 | s25 | REF | 75% |
| 1851 | s25 | SNP | 80% |
| 1852 | s25 | REF | 75% |
| 1853 | s25 | SNP | 80% |
| 1854 | s25 | REF | 80% |
| 1855 | s25 | SNP | 80% |
| 1856 | s25 | REF | 75% |
| 1857 | s25 | SNP | 80% |
| 1858 | s25 | REF | 75% |
| 1859 | s25 | SNP | 80% |
| 1860 | s25 | REF | 80% |
| 1861 | s25 | SNP | 80% |
| 1862 | s25 | REF | 75% |
| 1863 | s25 | REF | 75% |
| 1864 | s25 | SNP | 80% |
| 1865 | s25 | SNP | 75% |
| 1866 | s25 | REF | 70% |
| 1867 | s25 | SNP | 80% |
| 1868 | s25 | REF | 75% |
| 1869 | s25 | REF | 70% |
| 1870 | s25 | SNP | 75% |
| 1871 | s25 | REF | 75% |
| 1872 | s25 | REF | 75% |
| 1873 | s25 | SNP | 80% |
| 1874 | s24 | SNP | 70% |
| 1875 | s24 | REF | 70% |
| 1876 | s24 | SNP | 65% |
| 1877 | s24 | REF | 55% |
| 1878 | s24 | SNP | 55% |
| 1879 | s24 | SNP | 55% |
| 1880 | s24 | REF | 55% |
| 1881 | s24 | SNP | 70% |
| 1882 | s24 | REF | 70% |
| 1883 | s24 | REF | 65% |
| 1884 | s24 | SNP | 70% |
| 1885 | s24 | SNP | 60% |
| 1886 | s24 | SNP | 60% |
| 1887 | s24 | REF | 60% |
| 1888 | s24 | SNP | 65% |
| 1889 | s24 | REF | 65% |
| 1890 | s24 | SNP | 65% |
| 1891 | s24 | REF | 65% |
| 1892 | s24 | SNP | 55% |
| 1893 | s24 | REF | 55% |
| 1894 | s26 | SNP | 45% |
| 1895 | s26 | SNP | 50% |
| 1896 | s26 | SNP | 40% |
| 1897 | s26 | SNP | 40% |
| 1898 | s26 | REF | 45% |
| 1899 | s26 | SNP | 40% |
| 1900 | s26 | SNP | 50% |
| 1901 | s26 | SNP | 50% |
| 1902 | s26 | SNP | 45% |
| 1903 | s26 | SNP | 55% |
| 1904 | s26 | SNP | 50% |
| 1905 | s26 | SNP | 40% |
| 1906 | s26 | SNP | 50% |
| 1907 | s26 | SNP | 50% |
| 1908 | s26 | SNP | 55% |
| 1909 | s26 | REF | 45% |
| 1910 | s26 | SNP | 45% |
| 1911 | s26 | SNP | 40% |
| 1912 | s26 | SNP | 50% |
| 1913 | s26 | SNP | 45% |
| 1914 | s26 | SNP | 55% |
| 1915 | s26 | SNP | 45% |
| 1916 | s26 | SNP | 50% |
| 1917 | s26 | SNP | 50% |
| 1918 | s26 | SNP | 55% |
| 1919 | s26 | SNP | 45% |
| 1920 | s26 | SNP | 45% |
| 1921 | s26 | SNP | 40% |
| 1922 | s26 | SNP | 45% |
| 1923 | s26 | SNP | 55% |
| 1924 | s26 | SNP | 45% |
| 1925 | s26 | SNP | 50% |
| 1926 | s26 | SNP | 50% |
| 1927 | s27 | REF | 60% |
| 1928 | s27 | REF | 60% |
| 1929 | s27 | REF | 65% |
| 1930 | s27 | REF | 60% |
| 1931 | s27 | REF | 55% |
| 1932 | s27 | SNP | 55% |
| 1933 | s27 | REF | 50% |
| 1934 | s27 | REF | 65% |
| 1935 | s27 | SNP | 50% |
| 1936 | s27 | REF | 65% |
| 1937 | s27 | REF | 65% |
| 1938 | s27 | REF | 65% |
| 1939 | s27 | SNP | 60% |
| 1940 | s27 | REF | 65% |
| 1941 | s27 | SNP | 60% |
| 1942 | s27 | REF | 65% |
| 1943 | s27 | SNP | 45% |
| 1944 | s27 | REF | 60% |
| 1945 | s27 | REF | 65% |
| 1946 | s27 | REF | 55% |
| 1947 | s27 | SNP | 45% |
| 1948 | s27 | REF | 50% |
| 1949 | s28 | REF | 55% |
| 1950 | s28 | SNP | 50% |
| 1951 | s28 | REF | 65% |
| 1952 | s28 | SNP | 60% |
| 1953 | s28 | SNP | 65% |
| 1954 | s28 | REF | 70% |
| 1955 | s28 | SNP | 65% |
| 1956 | s28 | REF | 70% |
| 1957 | s28 | SNP | 45% |
| 1958 | s28 | REF | 50% |
| 1959 | s28 | SNP | 45% |
| 1960 | s28 | REF | 50% |
| 1961 | s28 | SNP | 45% |
| 1962 | s28 | REF | 45% |
| 1963 | s28 | SNP | 40% |
| 1964 | s28 | REF | 50% |
| 1965 | s28 | REF | 45% |
| 1966 | s28 | SNP | 40% |
| 1967 | s28 | SNP | 65% |
| 1968 | s28 | REF | 70% |
| 1969 | s28 | SNP | 50% |
| 1970 | s28 | REF | 55% |
| 1971 | s28 | SNP | 70% |
| 1972 | s28 | REF | 75% |
| 1973 | s28 | SNP | 50% |
| 1974 | s28 | REF | 55% |
| 1975 | s28 | SNP | 55% |
| 1976 | s28 | REF | 60% |
| 1977 | s28 | SNP | 65% |
| 1978 | s28 | REF | 70% |
| 1979 | s28 | SNP | 40% |
| 1980 | s28 | REF | 45% |
| 1981 | s28 | REF | 50% |
| 1982 | s28 | SNP | 45% |
| 1983 | s28 | SNP | 50% |
| 1984 | s28 | REF | 45% |
| 1985 | s28 | SNP | 40% |
| 1986 | s28 | SNP | 45% |
| 1987 | s28 | REF | 50% |
| 1988 | s28 | REF | 55% |
| 1989 | s28 | SNP | 50% |
| 1990 | s28 | SNP | 50% |
| 1991 | s28 | REF | 50% |
| 1992 | s28 | SNP | 45% |
| 1993 | s28 | REF | 55% |
| 1994 | s28 | SNP | 50% |
| 1995 | s28 | REF | 50% |
| 1996 | s28 | SNP | 45% |
| 1997 | s28 | REF | 55% |
| 1998 | s28 | REF | 55% |
| 1999 | s28 | SNP | 45% |
| 2000 | s28 | REF | 50% |
| 2001 | s28 | REF | 50% |
| 2002 | s28 | SNP | 45% |
| 2003 | s28 | REF | 50% |
| 2004 | s28 | SNP | 40% |
| 2005 | s28 | REF | 45% |
| 2006 | s28 | SNP | 40% |
| 2007 | s28 | REF | 45% |
| 2008 | s29 | REF | 65% |
| 2009 | s29 | SNP | 60% |
| 2010 | s29 | SNP | 50% |
| 2011 | s29 | REF | 55% |
| 2012 | s29 | SNP | 50% |
| 2013 | s29 | SNP | 50% |
| 2014 | s29 | REF | 55% |
| 2015 | s29 | REF | 70% |
| 2016 | s29 | SNP | 65% |
| 2017 | s29 | REF | 55% |
| 2018 | s29 | SNP | 55% |
| 2019 | s29 | REF | 70% |
| 2020 | s29 | SNP | 65% |
| 2021 | s29 | SNP | 55% |
| 2022 | s29 | SNP | 50% |
| 2023 | s29 | REF | 55% |
| 2024 | s29 | REF | 55% |
| 2025 | s29 | SNP | 50% |
| 2026 | s29 | REF | 60% |
| 2027 | s29 | REF | 70% |
| 2028 | s29 | SNP | 65% |
| 2029 | s29 | SNP | 50% |
| 2030 | s29 | REF | 55% |
| 2031 | s29 | SNP | 50% |
| 2032 | s29 | REF | 55% |
| 2033 | s29 | SNP | 65% |
| 2034 | s29 | REF | 70% |
| 2035 | s29 | SNP | 65% |
| 2036 | s29 | REF | 70% |
| 2037 | s29 | REF | 70% |
| 2038 | s29 | SNP | 60% |
| 2039 | s29 | REF | 65% |
| 2040 | s29 | SNP | 50% |
| 2041 | s29 | REF | 55% |
| 2042 | s29 | REF | 70% |
| 2043 | s29 | SNP | 65% |
| 2044 | s29 | REF | 55% |
| 2045 | s29 | SNP | 50% |
| 2046 | s29 | SNP | 50% |
| 2047 | s29 | REF | 55% |
| 2048 | s29 | REF | 55% |
| 2049 | s29 | SNP | 50% |
| 2050 | s29 | REF | 60% |
| 2051 | s29 | SNP | 60% |
| 2052 | s29 | REF | 65% |
| 2053 | s29 | SNP | 55% |
| 2054 | s29 | REF | 60% |
| 2055 | s29 | SNP | 50% |
| 2056 | s29 | REF | 55% |
| 2057 | s29 | SNP | 65% |
| 2058 | s29 | REF | 70% |
| 2059 | s29 | SNP | 65% |
| 2060 | s30 | REF | 50% |
| 2061 | s30 | REF | 55% |
| 2062 | s30 | SNP | 50% |
| 2063 | s30 | REF | 60% |
| 2064 | s30 | SNP | 55% |
| 2065 | s30 | REF | 70% |
| 2066 | s30 | SNP | 55% |
| 2067 | s30 | REF | 60% |
| 2068 | s30 | REF | 60% |
| 2069 | s30 | REF | 75% |
| 2070 | s30 | SNP | 60% |
| 2071 | s30 | REF | 65% |
| 2072 | s30 | REF | 70% |
| 2073 | s30 | SNP | 55% |
| 2074 | s30 | REF | 75% |
| 2075 | s30 | REF | 60% |
| 2076 | s30 | REF | 60% |
| 2077 | s30 | REF | 70% |
| 2078 | s30 | SNP | 65% |
| 2079 | s30 | REF | 70% |
| 2080 | s30 | SNP | 70% |
| 2081 | s30 | REF | 75% |
| 2082 | s30 | REF | 55% |
| 2083 | s30 | REF | 70% |
| 2084 | s30 | SNP | 65% |
| 2085 | s30 | SNP | 55% |
| 2086 | s30 | REF | 65% |
| 2087 | s30 | SNP | 60% |
| 2088 | s30 | SNP | 65% |
| 2089 | s30 | REF | 70% |
| 2090 | s30 | REF | 70% |
| 2091 | s30 | SNP | 60% |
| 2092 | s30 | REF | 60% |
| 2093 | s30 | REF | 65% |
| 2094 | s30 | REF | 70% |
| 2095 | s30 | SNP | 65% |
| 2096 | s30 | SNP | 55% |
| 2097 | s30 | SNP | 55% |
| 2098 | s30 | REF | 60% |
| 2099 | s30 | SNP | 65% |
| 2100 | s30 | REF | 70% |
| 2101 | s30 | REF | 65% |
| 2102 | s30 | SNP | 60% |
| 2103 | s30 | SNP | 70% |
| 2104 | s30 | REF | 75% |
| 2105 | s30 | REF | 65% |
| 2106 | s30 | REF | 65% |
| 2107 | s30 | SNP | 60% |
| 2108 | s30 | REF | 60% |
| 2109 | s30 | SNP | 55% |
| 2110 | s30 | SNP | 60% |
| 2111 | s30 | REF | 65% |
| 2112 | s31 | SNP | 40% |
| 2113 | s31 | REF | 45% |
| 2114 | s31 | SNP | 45% |
| 2115 | s31 | SNP | 30% |
| 2116 | s31 | SNP | 35% |
| 2117 | s31 | REF | 50% |
| 2118 | s31 | SNP | 40% |
| 2119 | s31 | SNP | 30% |
| 2120 | s31 | SNP | 35% |
| 2121 | s31 | SNP | 35% |
| 2122 | s31 | SNP | 35% |
| 2123 | s31 | SNP | 35% |
| 2124 | s31 | REF | 50% |
| 2125 | s31 | REF | 45% |
| 2126 | s31 | SNP | 40% |
| 2127 | s31 | SNP | 35% |
| 2128 | s31 | SNP | 40% |
| 2129 | s31 | REF | 45% |
| 2130 | s31 | REF | 50% |
| 2131 | s31 | SNP | 45% |
| 2132 | s31 | SNP | 45% |
| 2133 | s31 | REF | 50% |
| 2134 | s31 | SNP | 40% |
| 2135 | s31 | SNP | 30% |
| 2136 | s31 | REF | 45% |
| 2137 | s31 | SNP | 40% |
| 2138 | s31 | SNP | 35% |
| 2139 | s31 | SNP | 35% |
| 2140 | s31 | SNP | 35% |
| 2141 | s31 | SNP | 40% |
| 2142 | s31 | REF | 45% |
| 2143 | s31 | REF | 50% |
| 2144 | s31 | SNP | 45% |
| 2145 | s31 | SNP | 40% |
| 2146 | s31 | REF | 45% |
| 2147 | s31 | SNP | 35% |
| 2148 | s31 | SNP | 35% |
| 2149 | s32 | SNP | 60% |
| 2150 | s32 | REF | 65% |
| 2151 | s32 | REF | 55% |
| 2152 | s32 | SNP | 60% |
| 2153 | s32 | REF | 65% |
| 2154 | s32 | SNP | 50% |
| 2155 | s32 | REF | 55% |
| 2156 | s32 | SNP | 65% |
| 2157 | s32 | REF | 70% |
| 2158 | s32 | SNP | 50% |
| 2159 | s32 | SNP | 60% |
| 2160 | s32 | SNP | 60% |
| 2161 | s32 | REF | 65% |
| 2162 | s32 | REF | 55% |
| 2163 | s32 | SNP | 65% |
| 2164 | s32 | REF | 70% |
| 2165 | s32 | SNP | 50% |
| 2166 | s32 | REF | 55% |
| 2167 | s32 | SNP | 50% |
| 2168 | s32 | REF | 55% |
| 2169 | s32 | SNP | 50% |
| 2170 | s32 | REF | 60% |
| 2171 | s32 | SNP | 55% |
| 2172 | s32 | REF | 60% |
| 2173 | s32 | REF | 65% |
| 2174 | s32 | SNP | 60% |
| 2175 | s32 | REF | 65% |
| 2176 | s32 | SNP | 60% |
| 2177 | s32 | SNP | 65% |
| 2178 | s32 | REF | 70% |
| 2179 | s32 | REF | 70% |
| 2180 | s32 | SNP | 65% |
| 2181 | s32 | SNP | 65% |
| 2182 | s32 | REF | 60% |
| 2183 | s32 | SNP | 55% |
| 2184 | s32 | SNP | 55% |
| 2185 | s32 | REF | 60% |
| 2186 | s32 | REF | 75% |
| 2187 | s32 | SNP | 70% |
| 2188 | s32 | SNP | 70% |
| 2189 | s32 | REF | 60% |
| 2190 | s32 | SNP | 55% |
| 2191 | s32 | REF | 75% |
| 2192 | s32 | REF | 70% |
| 2193 | s32 | REF | 70% |
| 2194 | s32 | SNP | 65% |
| 2195 | s32 | REF | 65% |
| 2196 | s32 | SNP | 60% |
| 2197 | s32 | REF | 65% |
| 2198 | s32 | SNP | 55% |
| 2199 | s32 | REF | 60% |
| 2200 | s32 | SNP | 60% |
| 2201 | s32 | REF | 65% |
| 2202 | s32 | SNP | 55% |
| 2203 | s32 | REF | 70% |
| 2204 | s32 | SNP | 65% |
| 2205 | s32 | REF | 60% |
| 2206 | s32 | SNP | 55% |
| 2207 | s32 | REF | 65% |
| 2208 | s32 | SNP | 60% |
| 2209 | s32 | REF | 65% |
| 2210 | s32 | SNP | 60% |
| 2211 | s33 | SNP | 65% |
| 2212 | s33 | SNP | 65% |
| 2213 | s33 | REF | 70% |
| 2214 | s33 | SNP | 65% |
| 2215 | s33 | REF | 70% |
| 2216 | s33 | REF | 70% |
| 2217 | s33 | SNP | 65% |
| 2218 | s33 | REF | 70% |
| 2219 | s33 | REF | 70% |
| 2220 | s33 | SNP | 70% |
| 2221 | s33 | REF | 75% |
| 2222 | s33 | SNP | 70% |
| 2223 | s33 | REF | 75% |
| 2224 | s33 | SNP | 70% |
| 2225 | s33 | REF | 75% |
| 2226 | s33 | SNP | 70% |
| 2227 | s33 | REF | 75% |
| 2228 | s33 | REF | 70% |
| 2229 | s33 | REF | 70% |
| 2230 | s33 | SNP | 65% |
| 2231 | s33 | REF | 70% |
| 2232 | s33 | REF | 70% |
| 2233 | s33 | SNP | 65% |
| 2234 | s33 | REF | 75% |
| 2235 | s33 | REF | 70% |
| 2236 | s33 | REF | 70% |
| 2237 | s33 | REF | 75% |
| 2238 | s33 | REF | 75% |
| 2239 | s33 | REF | 75% |
| 2240 | s33 | REF | 70% |
| 2241 | s33 | SNP | 65% |
| 2242 | s33 | REF | 70% |
| 2243 | s33 | REF | 70% |
| 2244 | s33 | REF | 70% |
| 2245 | s33 | SNP | 65% |
| 2246 | s33 | REF | 70% |
| 2247 | s33 | REF | 70% |
| 2248 | s33 | REF | 70% |
| 2249 | s33 | SNP | 65% |
| 2250 | s34 | SNP | 45% |
| 2251 | s34 | REF | 50% |
| 2252 | s34 | REF | 35% |
| 2253 | s34 | SNP | 30% |
| 2254 | s34 | SNP | 45% |
| 2255 | s34 | REF | 50% |
| 2256 | s34 | SNP | 45% |
| 2257 | s34 | REF | 50% |
| 2258 | s34 | REF | 40% |
| 2259 | s34 | SNP | 35% |
| 2260 | s34 | SNP | 35% |
| 2261 | s34 | REF | 40% |
| 2262 | s34 | SNP | 50% |
| 2263 | s34 | SNP | 35% |
| 2264 | s34 | SNP | 55% |
| 2265 | s34 | REF | 55% |
| 2266 | s34 | SNP | 50% |
| 2267 | s34 | REF | 55% |
| 2268 | s34 | REF | 40% |
| 2269 | s34 | SNP | 35% |
| 2270 | s34 | REF | 50% |
| 2271 | s34 | SNP | 45% |
| 2272 | s34 | REF | 40% |
| 2273 | s34 | REF | 45% |
| 2274 | s34 | SNP | 40% |
| 2275 | s34 | REF | 50% |
| 2276 | s34 | SNP | 45% |
| 2277 | s34 | REF | 50% |
| 2278 | s34 | SNP | 45% |
| 2279 | s34 | REF | 55% |
| 2280 | s34 | SNP | 50% |
| 2281 | s34 | REF | 50% |
| 2282 | s34 | SNP | 45% |
| 2283 | s34 | SNP | 45% |
| 2284 | s34 | REF | 50% |
| 2285 | s34 | REF | 45% |
| 2286 | s34 | REF | 55% |
| 2287 | s34 | SNP | 50% |
| 2288 | s34 | SNP | 40% |
| 2289 | s34 | REF | 45% |
| 2290 | s34 | REF | 60% |
| 2291 | s34 | SNP | 55% |
| 2292 | s34 | REF | 50% |
| 2293 | s34 | SNP | 45% |
| 2294 | s34 | SNP | 45% |
| 2295 | s34 | REF | 50% |
| 2296 | s34 | REF | 60% |
| 2297 | s34 | SNP | 35% |
| 2298 | s34 | REF | 40% |
| 2299 | s34 | SNP | 55% |
| 2300 | s34 | SNP | 45% |
| 2301 | s34 | REF | 50% |
| 2302 | s34 | SNP | 45% |
| 2303 | s34 | SNP | 45% |
| 2304 | s34 | REF | 50% |
| 2305 | s34 | REF | 60% |
| 2306 | s34 | SNP | 55% |
| 2307 | s34 | REF | 60% |
| 2308 | s35 | REF | 50% |
| 2309 | s35 | SNP | 50% |
| 2310 | s35 | REF | 65% |
| 2311 | s35 | SNP | 65% |
| 2312 | s35 | SNP | 65% |
| 2313 | s35 | REF | 65% |
| 2314 | s35 | REF | 50% |
| 2315 | s35 | SNP | 50% |
| 2316 | s35 | REF | 50% |
| 2317 | s35 | SNP | 50% |
| 2318 | s35 | SNP | 50% |
| 2319 | s35 | REF | 50% |
| 2320 | s35 | REF | 65% |
| 2321 | s35 | SNP | 65% |
| 2322 | s35 | SNP | 50% |
| 2323 | s35 | SNP | 70% |
| 2324 | s35 | REF | 70% |
| 2325 | s35 | REF | 50% |
| 2326 | s35 | SNP | 50% |
| 2327 | s35 | SNP | 50% |
| 2328 | s35 | REF | 50% |
| 2329 | s35 | REF | 65% |
| 2330 | s35 | REF | 65% |
| 2331 | s35 | SNP | 65% |
| 2332 | s35 | SNP | 50% |
| 2333 | s35 | REF | 50% |
| 2334 | s35 | SNP | 50% |
| 2335 | s35 | SNP | 65% |
| 2336 | s35 | REF | 65% |
| 2337 | s35 | SNP | 60% |
| 2338 | s35 | REF | 60% |
| 2339 | s35 | SNP | 65% |
| 2340 | s35 | REF | 65% |
| 2341 | s35 | SNP | 65% |
| 2342 | s35 | REF | 65% |
| 2343 | s35 | SNP | 50% |
| 2344 | s35 | REF | 50% |
| 2345 | s35 | SNP | 55% |
| 2346 | s35 | REF | 55% |
| 2347 | s35 | REF | 50% |
| 2348 | s35 | SNP | 50% |
| 2349 | s35 | REF | 65% |
| 2350 | s35 | REF | 65% |
| 2351 | s35 | SNP | 65% |
| 2352 | s35 | SNP | 50% |
| 2353 | s35 | REF | 50% |
| 2354 | s35 | REF | 50% |
| 2355 | s35 | SNP | 65% |
| 2356 | s35 | REF | 65% |
| 2357 | s35 | SNP | 50% |
| 2358 | s35 | REF | 50% |
| 2359 | s35 | REF | 50% |
| 2360 | s35 | SNP | 50% |
| 2361 | s35 | REF | 70% |
| 2362 | s35 | REF | 50% |
| 2363 | s35 | SNP | 50% |
| 2364 | s35 | REF | 50% |
| 2365 | s35 | SNP | 50% |
| 2366 | s35 | REF | 60% |
| 2367 | s35 | SNP | 60% |
| 2368 | s35 | REF | 50% |
| 2369 | s35 | SNP | 50% |
| 2370 | s35 | SNP | 65% |
| 2371 | s35 | REF | 65% |
| 2372 | s35 | SNP | 50% |
| 2373 | s35 | SNP | 65% |
| 2374 | s35 | SNP | 50% |
| 2375 | s35 | REF | 50% |
| 2376 | s35 | REF | 50% |
| 2377 | s35 | SNP | 50% |
| 2378 | s35 | REF | 50% |
| 2379 | s35 | REF | 65% |
| 2380 | s35 | SNP | 65% |
| 2381 | s35 | REF | 55% |
| 2382 | s35 | SNP | 55% |
| 2383 | s36 | SNP | 50% |
| 2384 | s36 | REF | 45% |
| 2385 | s36 | REF | 40% |
| 2386 | s36 | SNP | 40% |
| 2387 | s36 | REF | 35% |
| 2388 | s36 | SNP | 55% |
| 2389 | s36 | REF | 50% |
| 2390 | s36 | REF | 55% |
| 2391 | s36 | SNP | 60% |
| 2392 | s36 | REF | 45% |
| 2393 | s36 | SNP | 50% |
| 2394 | s36 | REF | 40% |
| 2395 | s36 | REF | 55% |
| 2396 | s36 | SNP | 60% |
| 2397 | s36 | SNP | 45% |
| 2398 | s36 | SNP | 60% |
| 2399 | s36 | REF | 55% |
| 2400 | s36 | SNP | 60% |
| 2401 | s36 | REF | 55% |
| 2402 | s36 | SNP | 45% |
| 2403 | s36 | REF | 55% |
| 2404 | s36 | SNP | 60% |
| 2405 | s36 | REF | 45% |
| 2406 | s36 | REF | 60% |
| 2407 | s36 | SNP | 65% |
| 2408 | s36 | SNP | 45% |
| 2409 | s36 | REF | 40% |
| 2410 | s36 | REF | 50% |
| 2411 | s36 | SNP | 55% |
| 2412 | s36 | REF | 55% |
| 2413 | s36 | SNP | 60% |
| 2414 | s36 | SNP | 65% |
| 2415 | s36 | REF | 60% |
| 2416 | s36 | SNP | 60% |
| 2417 | s36 | REF | 55% |
| 2418 | s36 | SNP | 60% |
| 2419 | s36 | SNP | 45% |
| 2420 | s36 | REF | 40% |
| 2421 | s36 | REF | 40% |
| 2422 | s36 | SNP | 65% |
| 2423 | s36 | REF | 45% |
| 2424 | s36 | SNP | 50% |
| 2425 | s36 | SNP | 50% |
| 2426 | s36 | REF | 45% |
| 2427 | s36 | SNP | 45% |
| 2428 | s36 | SNP | 60% |
| 2429 | s36 | REF | 55% |
| 2430 | s36 | REF | 60% |
| 2431 | s36 | REF | 55% |
| 2432 | s36 | SNP | 60% |
| 2433 | s36 | SNP | 60% |
| 2434 | s36 | REF | 55% |
| 2435 | s36 | SNP | 60% |
| 2436 | s36 | REF | 55% |
| 2437 | s37 | SNP | 70% |
| 2438 | s37 | SNP | 75% |
| 2439 | s37 | SNP | 75% |
| 2440 | s37 | SNP | 80% |
| 2441 | s37 | SNP | 80% |
| 2442 | s37 | SNP | 75% |
| 2443 | s37 | SNP | 70% |
| 2444 | s37 | SNP | 75% |
| 2445 | s37 | SNP | 70% |
| 2446 | s37 | REF | 70% |
| 2447 | s37 | SNP | 80% |
| 2448 | s37 | SNP | 75% |
| 2449 | s37 | REF | 70% |
| 2450 | s37 | SNP | 70% |
| 2451 | s37 | SNP | 75% |
| 2452 | s37 | SNP | 75% |
| 2453 | s37 | SNP | 70% |
| 2454 | s37 | SNP | 75% |
| 2455 | s37 | REF | 70% |
| 2456 | s37 | SNP | 75% |
| 2457 | s37 | SNP | 80% |
| 2458 | s37 | SNP | 75% |
| 2459 | s37 | SNP | 75% |
| 2460 | s37 | SNP | 75% |
| 2461 | s37 | SNP | 70% |
| 2462 | s37 | SNP | 75% |
| 2463 | s37 | SNP | 75% |
| 2464 | s37 | SNP | 70% |
| 2465 | s37 | SNP | 70% |
| 2466 | s37 | REF | 70% |
| 2467 | s37 | SNP | 75% |
| 2468 | s38 | SNP | 55% |
| 2469 | s38 | SNP | 55% |
| 2470 | s38 | REF | 55% |
| 2471 | s38 | SNP | 60% |
| 2472 | s38 | REF | 60% |
| 2473 | s38 | REF | 60% |
| 2474 | s38 | SNP | 60% |
| 2475 | s38 | SNP | 45% |
| 2476 | s38 | REF | 45% |
| 2477 | s38 | SNP | 55% |
| 2478 | s38 | REF | 55% |
| 2479 | s38 | SNP | 65% |
| 2480 | s38 | REF | 65% |
| 2481 | s38 | SNP | 60% |
| 2482 | s38 | REF | 60% |
| 2483 | s38 | SNP | 60% |
| 2484 | s38 | SNP | 60% |
| 2485 | s38 | REF | 60% |
| 2486 | s38 | REF | 60% |
| 2487 | s38 | SNP | 60% |
| 2488 | s38 | SNP | 60% |
| 2489 | s38 | REF | 60% |
| 2490 | s38 | REF | 60% |
| 2491 | s38 | SNP | 60% |
| 2492 | s38 | REF | 60% |
| 2493 | s38 | SNP | 60% |
| 2494 | s38 | SNP | 60% |
| 2495 | s38 | REF | 60% |
| 2496 | s38 | REF | 55% |
| 2497 | s38 | SNP | 55% |
| 2498 | s38 | REF | 50% |
| 2499 | s38 | SNP | 50% |
| 2500 | s38 | REF | 60% |
| 2501 | s38 | REF | 60% |
| 2502 | s38 | SNP | 60% |
| 2503 | s38 | SNP | 55% |
| 2504 | s38 | REF | 55% |
| 2505 | s38 | REF | 55% |
| 2506 | s38 | SNP | 55% |
| 2507 | s38 | REF | 60% |
| 2508 | s38 | SNP | 60% |
| 2509 | s38 | SNP | 60% |
| 2510 | s38 | REF | 55% |
| 2511 | s38 | SNP | 55% |
| 2512 | s38 | REF | 60% |
| 2513 | s38 | SNP | 60% |
| 2514 | s38 | REF | 55% |
| 2515 | s38 | SNP | 55% |
| 2516 | s38 | SNP | 50% |
| 2517 | s38 | REF | 50% |
| 2518 | s38 | SNP | 45% |
| 2519 | s38 | REF | 45% |
| 2520 | s39 | SNP | 65% |
| 2521 | s39 | REF | 70% |
| 2522 | s39 | REF | 70% |
| 2523 | s39 | REF | 80% |
| 2524 | s39 | SNP | 75% |
| 2525 | s39 | SNP | 65% |
| 2526 | s39 | REF | 70% |
| 2527 | s39 | REF | 80% |
| 2528 | s39 | SNP | 75% |
| 2529 | s39 | REF | 80% |
| 2530 | s39 | SNP | 75% |
| 2531 | s39 | SNP | 65% |
| 2532 | s39 | REF | 70% |
| 2533 | s39 | REF | 75% |
| 2534 | s39 | SNP | 70% |
| 2535 | s39 | REF | 70% |
| 2536 | s39 | SNP | 65% |
| 2537 | s39 | REF | 70% |
| 2538 | s39 | SNP | 75% |
| 2539 | s39 | REF | 80% |
| 2540 | s39 | SNP | 75% |
| 2541 | s39 | REF | 80% |
| 2542 | s39 | REF | 75% |
| 2543 | s39 | SNP | 70% |
| 2544 | s39 | REF | 80% |
| 2545 | s39 | REF | 75% |
| 2546 | s39 | REF | 75% |
| 2547 | s39 | SNP | 70% |
| 2548 | s39 | REF | 70% |
| 2549 | s39 | SNP | 65% |
| 2550 | s39 | REF | 75% |
| 2551 | s39 | SNP | 65% |
| 2552 | s39 | SNP | 65% |
| 2553 | s39 | REF | 70% |
| 2554 | s40 | REF | 65% |
| 2555 | s40 | SNP | 70% |
| 2556 | s40 | REF | 70% |
| 2557 | s40 | SNP | 75% |
| 2558 | s40 | REF | 65% |
| 2559 | s40 | REF | 65% |
| 2560 | s40 | REF | 70% |
| 2561 | s40 | SNP | 75% |
| 2562 | s40 | REF | 65% |
| 2563 | s40 | SNP | 70% |
| 2564 | s40 | REF | 70% |
| 2565 | s40 | SNP | 75% |
| 2566 | s40 | SNP | 75% |
| 2567 | s40 | REF | 70% |
| 2568 | s40 | SNP | 75% |
| 2569 | s40 | SNP | 75% |
| 2570 | s40 | REF | 70% |
| 2571 | s40 | SNP | 70% |
| 2572 | s40 | REF | 65% |
| 2573 | s40 | SNP | 70% |
| 2574 | s40 | SNP | 70% |
| 2575 | s40 | REF | 65% |
| 2576 | s40 | REF | 65% |
| 2577 | s40 | SNP | 70% |
| 2578 | s40 | SNP | 75% |
| 2579 | s40 | REF | 70% |
| 2580 | s40 | REF | 70% |
| 2581 | s40 | SNP | 75% |
| 2582 | s40 | REF | 70% |
| 2583 | s40 | SNP | 75% |
| 2584 | s40 | REF | 70% |
| 2585 | s40 | SNP | 75% |
| 2586 | s40 | REF | 70% |
| 2587 | s40 | SNP | 70% |
| 2588 | s40 | REF | 65% |
| 2589 | s40 | SNP | 70% |
| 2590 | s40 | REF | 65% |
| 2591 | s40 | SNP | 70% |
| 2592 | s40 | SNP | 70% |
| 2593 | s40 | REF | 65% |
| 2594 | s40 | SNP | 70% |
| 2595 | s40 | REF | 65% |
| 2596 | s40 | REF | 60% |
| 2597 | s40 | REF | 65% |
| 2598 | s40 | SNP | 70% |
| 2599 | s40 | SNP | 65% |
| 2600 | s40 | SNP | 70% |
| 2601 | s40 | REF | 65% |
| 2602 | s40 | REF | 70% |
| 2603 | s40 | SNP | 70% |
| 2604 | s40 | REF | 65% |
| 2605 | s41 | SNP | 45% |
| 2606 | s41 | SNP | 35% |
| 2607 | s41 | SNP | 45% |
| 2608 | s41 | SNP | 45% |
| 2609 | s41 | SNP | 40% |
| 2610 | s42 | SNP | 40% |
| 2611 | s42 | REF | 35% |
| 2612 | s42 | REF | 35% |
| 2613 | s42 | SNP | 40% |
| 2614 | s42 | SNP | 60% |
| 2615 | s42 | REF | 45% |
| 2616 | s42 | SNP | 50% |
| 2617 | s42 | REF | 45% |
| 2618 | s42 | SNP | 50% |
| 2619 | s42 | REF | 55% |
| 2620 | s42 | SNP | 50% |
| 2621 | s42 | REF | 45% |
| 2622 | s42 | SNP | 45% |
| 2623 | s42 | REF | 40% |
| 2624 | s42 | REF | 45% |
| 2625 | s42 | SNP | 50% |
| 2626 | s42 | REF | 45% |
| 2627 | s42 | SNP | 50% |
| 2628 | s42 | SNP | 50% |
| 2629 | s42 | REF | 45% |
| 2630 | s42 | REF | 30% |
| 2631 | s42 | SNP | 35% |
| 2632 | s42 | REF | 30% |
| 2633 | s42 | SNP | 35% |
| 2634 | s42 | SNP | 60% |
| 2635 | s42 | REF | 55% |
| 2636 | s42 | REF | 35% |
| 2637 | s42 | SNP | 40% |
| 2638 | s42 | REF | 55% |
| 2639 | s42 | SNP | 60% |
| 2640 | s42 | REF | 55% |
| 2641 | s42 | SNP | 60% |
| 2642 | s42 | REF | 60% |
| 2643 | s42 | SNP | 65% |
| 2644 | s42 | SNP | 65% |
| 2645 | s42 | SNP | 35% |
| 2646 | s42 | REF | 30% |
| 2647 | s42 | SNP | 50% |
| 2648 | s42 | REF | 45% |
| 2649 | s42 | SNP | 40% |
| 2650 | s42 | REF | 35% |
| 2651 | s42 | REF | 45% |
| 2652 | s42 | SNP | 50% |
| 2653 | s42 | REF | 40% |
| 2654 | s42 | SNP | 45% |
| 2655 | s42 | SNP | 55% |
| 2656 | s42 | REF | 50% |
| 2657 | s42 | SNP | 30% |
| 2658 | s42 | SNP | 35% |
| 2659 | s42 | REF | 30% |
| 2660 | s42 | REF | 60% |
| 2661 | s42 | SNP | 50% |
| 2662 | s42 | REF | 45% |
| 2663 | s42 | SNP | 45% |
| 2664 | s42 | REF | 40% |
| 2665 | s43 | SNP | 60% |
| 2666 | s43 | REF | 55% |
| 2667 | s43 | SNP | 65% |
| 2668 | s43 | REF | 60% |
| 2669 | s43 | REF | 60% |
| 2670 | s43 | SNP | 65% |
| 2671 | s43 | SNP | 65% |
| 2672 | s43 | REF | 60% |
| 2673 | s43 | SNP | 60% |
| 2674 | s43 | REF | 55% |
| 2675 | s43 | REF | 50% |
| 2676 | s43 | SNP | 55% |
| 2677 | s43 | SNP | 65% |
| 2678 | s43 | REF | 60% |
| 2679 | s43 | REF | 60% |
| 2680 | s43 | SNP | 65% |
| 2681 | s43 | SNP | 60% |
| 2682 | s43 | REF | 55% |
| 2683 | s43 | REF | 65% |
| 2684 | s43 | SNP | 70% |
| 2685 | s43 | REF | 55% |
| 2686 | s43 | SNP | 60% |
| 2687 | s43 | REF | 55% |
| 2688 | s43 | SNP | 60% |
| 2689 | s43 | SNP | 70% |
| 2690 | s43 | REF | 65% |
| 2691 | s43 | SNP | 65% |
| 2692 | s43 | SNP | 60% |
| 2693 | s43 | REF | 55% |
| 2694 | s43 | REF | 60% |
| 2695 | s43 | SNP | 70% |
| 2696 | s43 | REF | 65% |
| 2697 | s43 | REF | 60% |
| 2698 | s43 | SNP | 65% |
| 2699 | s43 | REF | 55% |
| 2700 | s43 | SNP | 60% |
| 2701 | s43 | SNP | 65% |
| 2702 | s43 | REF | 60% |
| 2703 | s43 | REF | 55% |
| 2704 | s43 | SNP | 60% |
| 2705 | s43 | SNP | 70% |
| 2706 | s43 | REF | 65% |
| 2707 | s43 | SNP | 65% |
| 2708 | s43 | REF | 65% |
| 2709 | s43 | SNP | 70% |
| 2710 | s43 | SNP | 70% |
| 2711 | s43 | REF | 65% |
| 2712 | s43 | REF | 65% |
| 2713 | s43 | SNP | 70% |
| 2714 | s43 | REF | 65% |
| 2715 | s43 | SNP | 70% |
| 2716 | s43 | REF | 60% |
| 2717 | s43 | SNP | 65% |
| 2718 | s43 | SNP | 60% |
| 2719 | s43 | REF | 55% |
| 2720 | s43 | REF | 60% |
| 2721 | s43 | SNP | 65% |
| 2722 | s43 | SNP | 55% |
| 2723 | s43 | REF | 50% |
| 2724 | s43 | REF | 60% |
| 2725 | s44 | REF | 55% |
| 2726 | s44 | REF | 55% |
| 2727 | s44 | REF | 55% |
| 2728 | s44 | REF | 60% |
| 2729 | s44 | REF | 60% |
| 2730 | s44 | REF | 55% |
| 2731 | s44 | REF | 55% |
| 2732 | s44 | REF | 60% |
| 2733 | s44 | REF | 60% |
| 2734 | s44 | REF | 60% |
| 2735 | s44 | REF | 55% |
| 2736 | s44 | SNP | 50% |
| 2737 | s44 | REF | 60% |
| 2738 | s44 | REF | 60% |
| 2739 | s44 | REF | 60% |
| 2740 | s44 | REF | 60% |
| 2741 | s44 | REF | 55% |
| 2742 | s44 | REF | 60% |
| 2743 | s44 | REF | 60% |
| 2744 | s44 | REF | 55% |
| 2745 | s44 | REF | 55% |
| 2746 | s44 | REF | 55% |
| 2747 | s44 | REF | 55% |
| 2748 | s44 | REF | 55% |
| 2749 | s44 | REF | 55% |
| 2750 | s44 | REF | 55% |
| 2751 | s44 | REF | 50% |
| 2752 | s44 | REF | 55% |
| 2753 | s45 | REF | 75% |
| 2754 | s45 | REF | 75% |
| 2755 | s45 | SNP | 70% |
| 2756 | s45 | SNP | 70% |
| 2757 | s45 | SNP | 70% |
| 2758 | s45 | SNP | 70% |
| 2759 | s45 | REF | 75% |
| 2760 | s45 | SNP | 70% |
| 2761 | s45 | REF | 80% |
| 2762 | s45 | SNP | 75% |
| 2763 | s45 | REF | 80% |
| 2764 | s45 | SNP | 75% |
| 2765 | s45 | REF | 80% |
| 2766 | s45 | REF | 75% |
| 2767 | s45 | REF | 75% |
| 2768 | s45 | REF | 75% |
| 2769 | s45 | REF | 75% |
| 2770 | s45 | REF | 75% |
| 2771 | s45 | REF | 80% |
| 2772 | s45 | SNP | 75% |
| 2773 | s45 | SNP | 70% |
| 2774 | s45 | REF | 80% |
| 2775 | s45 | REF | 75% |
| 2776 | s45 | SNP | 75% |
| 2777 | s45 | REF | 75% |
| 2778 | s45 | SNP | 70% |
| 2779 | s45 | REF | 80% |
| 2780 | s45 | SNP | 75% |
| 2781 | s45 | REF | 75% |
| 2782 | s45 | REF | 75% |
| 2783 | s45 | SNP | 70% |
| 2784 | s45 | SNP | 75% |
| 2785 | s45 | REF | 80% |
| 2786 | s45 | SNP | 75% |
| 2787 | s45 | REF | 80% |
| 2788 | s45 | SNP | 70% |
| 2789 | s45 | REF | 75% |
| 2790 | s45 | REF | 75% |
| 2791 | s45 | REF | 75% |
| 2792 | s45 | SNP | 70% |
| 2793 | s45 | REF | 75% |
| 2794 | s45 | SNP | 70% |
| 2795 | s45 | REF | 75% |
| 2796 | s46 | SNP | 55% |
| 2797 | s46 | REF | 65% |
| 2798 | s46 | SNP | 60% |
| 2799 | s46 | SNP | 65% |
| 2800 | s46 | REF | 70% |
| 2801 | s46 | REF | 65% |
| 2802 | s46 | SNP | 60% |
| 2803 | s46 | SNP | 65% |
| 2804 | s46 | REF | 70% |
| 2805 | s46 | REF | 70% |
| 2806 | s46 | SNP | 60% |
| 2807 | s46 | SNP | 60% |
| 2808 | s46 | REF | 65% |
| 2809 | s46 | SNP | 65% |
| 2810 | s46 | REF | 70% |
| 2811 | s46 | SNP | 65% |
| 2812 | s46 | REF | 70% |
| 2813 | s46 | SNP | 65% |
| 2814 | s46 | REF | 70% |
| 2815 | s46 | REF | 75% |
| 2816 | s46 | SNP | 70% |
| 2817 | s46 | SNP | 65% |
| 2818 | s46 | REF | 70% |
| 2819 | s46 | REF | 70% |
| 2820 | s46 | SNP | 65% |
| 2821 | s46 | REF | 70% |
| 2822 | s46 | REF | 65% |
| 2823 | s46 | SNP | 60% |
| 2824 | s46 | SNP | 60% |
| 2825 | s46 | REF | 65% |
| 2826 | s46 | REF | 70% |
| 2827 | s46 | SNP | 65% |
| 2828 | s46 | SNP | 65% |
| 2829 | s46 | REF | 70% |
| 2830 | s46 | REF | 65% |
| 2831 | s46 | SNP | 60% |
| 2832 | s46 | SNP | 65% |
| 2833 | s46 | REF | 70% |
| 2834 | s46 | SNP | 65% |
| 2835 | s46 | REF | 70% |
| 2836 | s46 | REF | 70% |
| 2837 | s46 | SNP | 65% |
| 2838 | s46 | SNP | 70% |
| 2839 | s46 | REF | 75% |
| 2840 | s46 | SNP | 60% |
| 2841 | s46 | REF | 65% |
| 2842 | s46 | REF | 70% |
| 2843 | s46 | SNP | 65% |
| 2844 | s46 | REF | 70% |
| 2845 | s46 | REF | 70% |
| 2846 | s46 | SNP | 65% |
| 2847 | s46 | REF | 70% |
| 2848 | s46 | SNP | 65% |
| 2849 | s46 | REF | 65% |
| 2850 | s46 | SNP | 65% |
| 2851 | s46 | SNP | 60% |
| 2852 | s47 | REF | 65% |
| 2853 | s47 | REF | 60% |
| 2854 | s47 | REF | 70% |
| 2855 | s47 | SNP | 80% |
| 2856 | s47 | REF | 75% |
| 2857 | s47 | REF | 65% |
| 2858 | s47 | REF | 60% |
| 2859 | s47 | SNP | 80% |
| 2860 | s47 | REF | 75% |
| 2861 | s47 | REF | 70% |
| 2862 | s47 | SNP | 75% |
| 2863 | s47 | REF | 75% |
| 2864 | s47 | REF | 75% |
| 2865 | s47 | REF | 65% |
| 2866 | s47 | SNP | 70% |
| 2867 | s47 | SNP | 65% |
| 2868 | s47 | SNP | 65% |
| 2869 | s47 | REF | 55% |
| 2870 | s47 | REF | 70% |
| 2871 | s47 | SNP | 60% |
| 2872 | s47 | SNP | 70% |
| 2873 | s47 | REF | 65% |
| 2874 | s47 | SNP | 65% |
| 2875 | s47 | REF | 60% |
| 2876 | s47 | SNP | 80% |
| 2877 | s47 | SNP | 80% |
| 2878 | s47 | REF | 75% |
| 2879 | s47 | SNP | 80% |
| 2880 | s47 | REF | 75% |
| 2881 | s47 | REF | 55% |
| 2882 | s47 | SNP | 75% |
| 2883 | s47 | REF | 70% |
| 2884 | s47 | SNP | 60% |
| 2885 | s47 | REF | 75% |
| 2886 | s48 | REF | 50% |
| 2887 | s48 | SNP | 65% |
| 2888 | s48 | REF | 65% |
| 2889 | s48 | REF | 50% |
| 2890 | s48 | SNP | 50% |
| 2891 | s48 | REF | 45% |
| 2892 | s48 | SNP | 45% |
| 2893 | s48 | REF | 60% |
| 2894 | s48 | REF | 65% |
| 2895 | s48 | SNP | 65% |
| 2896 | s48 | SNP | 70% |
| 2897 | s48 | REF | 65% |
| 2898 | s48 | REF | 70% |
| 2899 | s48 | SNP | 70% |
| 2900 | s48 | REF | 70% |
| 2901 | s48 | SNP | 55% |
| 2902 | s48 | REF | 55% |
| 2903 | s48 | REF | 50% |
| 2904 | s48 | SNP | 50% |
| 2905 | s48 | REF | 45% |
| 2906 | s48 | SNP | 45% |
| 2907 | s48 | REF | 65% |
| 2908 | s48 | SNP | 65% |
| 2909 | s48 | REF | 50% |
| 2910 | s48 | SNP | 50% |
| 2911 | s49 | REF | 65% |
| 2912 | s49 | REF | 65% |
| 2913 | s49 | SNP | 55% |
| 2914 | s49 | REF | 65% |
| 2915 | s49 | SNP | 55% |
| 2916 | s49 | REF | 70% |
| 2917 | s49 | SNP | 55% |
| 2918 | s49 | REF | 60% |
| 2919 | s49 | REF | 60% |
| 2920 | s49 | REF | 70% |
| 2921 | s49 | REF | 60% |
| 2922 | s49 | REF | 60% |
| 2923 | s49 | REF | 65% |
| 2924 | s49 | REF | 65% |
| 2925 | s49 | REF | 65% |
| 2926 | s50 | SNP | 60% |
| 2927 | s50 | REF | 65% |
| 2928 | s50 | SNP | 60% |
| 2929 | s50 | REF | 60% |
| 2930 | s50 | SNP | 55% |
| 2931 | s50 | SNP | 55% |
| 2932 | s50 | REF | 60% |
| 2933 | s50 | REF | 65% |
| 2934 | s50 | REF | 60% |
| 2935 | s50 | SNP | 55% |
| 2936 | s50 | REF | 60% |
| 2937 | s48 | REF | 60% |
| 2938 | s48 | SNP | 60% |
| 2939 | s48 | SNP | 50% |
| 2940 | s48 | REF | 50% |
| 2941 | s48 | SNP | 65% |
| 2942 | s48 | REF | 65% |
| 2943 | s48 | REF | 70% |
| 2944 | s48 | SNP | 70% |
| 2945 | s48 | REF | 65% |
| 2946 | s48 | REF | 65% |
| 2947 | s48 | SNP | 65% |
| 2948 | s48 | SNP | 65% |
| 2949 | s48 | REF | 65% |
| 2950 | s48 | REF | 70% |
| 2951 | s48 | SNP | 70% |
| 2952 | s48 | SNP | 70% |
| 2953 | s48 | REF | 65% |
| 2954 | s48 | SNP | 65% |
| 2955 | s48 | REF | 70% |
| 2956 | s48 | SNP | 60% |
| 2957 | s48 | REF | 60% |
| 2958 | s48 | SNP | 65% |
| 2959 | s48 | REF | 65% |
| 2960 | s48 | REF | 70% |
| 2961 | s48 | SNP | 70% |
| 2962 | s48 | SNP | 70% |
| 2963 | s48 | REF | 70% |
| 2964 | s48 | REF | 75% |
| 2965 | s48 | SNP | 75% |
| 2966 | s48 | REF | 75% |
| 2967 | s48 | REF | 70% |
| 2968 | s48 | SNP | 60% |
| 2969 | s48 | REF | 60% |
| 2970 | s48 | SNP | 60% |
| 2971 | s48 | REF | 70% |
| 2972 | s51 | SNP | 55% |
| 2973 | s51 | SNP | 60% |
| 2974 | s51 | REF | 55% |
| 2975 | s51 | REF | 50% |
| 2976 | s51 | SNP | 55% |
| 2977 | s51 | REF | 55% |
| 2978 | s51 | REF | 55% |
| 2979 | s51 | SNP | 60% |
| 2980 | s51 | SNP | 65% |
| 2981 | s51 | REF | 60% |
| 2982 | s51 | SNP | 55% |
| 2983 | s51 | REF | 50% |
| 2984 | s51 | REF | 55% |
| 2985 | s51 | SNP | 60% |
| 2986 | s51 | REF | 45% |
| 2987 | s51 | SNP | 50% |
| 2988 | s51 | REF | 50% |
| 2989 | s51 | SNP | 55% |
| 2990 | s51 | REF | 60% |
| 2991 | s51 | REF | 45% |
| 2992 | s51 | SNP | 50% |
| 2993 | s51 | REF | 45% |
| 2994 | s51 | SNP | 50% |
| 2995 | s51 | SNP | 65% |
| 2996 | s51 | SNP | 60% |
| 2997 | s51 | SNP | 60% |
| 2998 | s51 | REF | 55% |
| 2999 | s51 | REF | 55% |
| 3000 | s51 | SNP | 60% |
| 3001 | s51 | SNP | 55% |
| 3002 | s51 | REF | 50% |
| 3003 | s51 | SNP | 55% |
| 3004 | s51 | REF | 45% |
| 3005 | s51 | SNP | 50% |
| 3006 | s51 | SNP | 60% |
| 3007 | s51 | REF | 55% |
| 3008 | s51 | SNP | 60% |
| 3009 | s51 | REF | 55% |
| 3010 | s51 | REF | 50% |

[0151] Examples are provided below to facilitate a more complete understanding of the invention. The following examples illustrate the exemplary modes of making and practicing the invention. However, the scope of the invention is not limited to specific embodiments disclosed in these Examples, which are for purposes of illustration only.

### Experimental Details

### EXAMPLE 1

### IMDPH1 Correction Anaylsis

[0152] Guide sequences comprising 17-20 nucleotides in the sequences of 17-20 contiguous nucleotides set forth in SEQ ID NOs: 1-3010 are screened for high on target activity. On target activity is determined by DNA capillary electrophoresis analysis.

[0153] According to DNA capillary electrophoresis analysis, guide sequences comprising 17-20 nucleotides in the sequences of 17-20 contiguous nucleotides set forth in SEQ ID NOs: 1-3010 are found to be suitable for correction of the IMDPH1 gene.

### Discussion

[0154] The guide sequences of the present invention are determined to be suitable for targeting the IMDPH1 gene.

### REFERENCES

[0155] 1. Ahmad and Allen (1992) “Antibody-mediated Specific Binging and Cytotoxicity of Lipsome-entrapped Doxorubicin to Lung Cancer Cells in Vitro”, Cancer Research 52:4817-20
[0156] 2. Anders (1992) “Human gene therapy”, Science 256:808-13
[0157] 3. Basha et al. (2011) “Influence of Cationic Lipid Composition on Gene Silencing Properties of Lipid Nanoparticle Formulations of siRNA in Antigen-Presenting Cells”, Mol. Ther. 19(12):2186-200
[0158] 4. Behr (1994) Gene transfer with synthetic cationic amphiphiles: Prospects for gene therapy”, Bioconjuage Chem 5:382-89
[0159] 5. Blaese (1995) “Vectors in cancer therapy: how will they deliver”, Cancer Gene Ther. 2:291-97
[0160] 6. Blaese et al. (1995) “T lympocyte-directed gene therapy for ADA-SCID: initial trial results after 4 years”, Science 270(5235):475-80
[0161] 7. Buchschacher and Panganiban (1992) “Human immunodeficiency virus vectors for inducible expression of foreign genes”, J. Virol. 66:2731-39
[0162] 8. Burstein et al. (2017) “New CRISPR-Cas systems from uncultivated microbes”, Nature 542:237-41
[0163] 9. Chung et al. (2006) “Agrobacterium is not alone: gene transfer to plants by viruses and other bacteria”, Trends Plant Sci. 11(1):1-4
[0164] 10. Coelho et al. (2013) “Safety and Efficacy of RNAi Therapy for Transthyretin Amyloidosis”, N Engl J. Med 369:819-29
[0165] 11. Crystal (1995) “Transfer of genes to humans: early lessons and obstacles to success”, Science 270(5235):404-10
[0166] 12. Dillon (1993) “Regulation gene expression in gene therapy” Trends in Biotechnology 11(5):167-173
[0167] 13. Dranoff et al. (1997) “A phase I study of vaccination with autologous, irradiated melanoma cells engineered to secrete human granulocyte macrophage colony stimulating factor”, Hum. Gene Ther. 8(1):111-23
[0168] 14. Dunbar et al. (1995) “Retrovirally marked CD34-enriched peripheral blood and bone marrow cells contribute to long-term engraftment after autologous transplantation”, Blood 85:3048-57
[0169] 15. Ellem et al. (1997) “A case report: immune responses and clinical course of the first human use of ganulocyte/macrophage-colony-stimulating-factor-tranduced autologous melanoma cells for immunotherapy”, Cancer Immunol Immunother 44:10-20
[0170] 16. Gao and Huang (1995) “Cationic liposome-mediated gene transfer” Gene Ther. 2(10):710-22
[0171] 17. Haddada et al. (1995) “Gene Therapy Using Adenovirus Vectors”, in: The Molecular Repertoire of Adenoviruses III: Biology and Pathogenesis, ed. Doerfler and Böhm, pp. 297-306
[0172] 18. Han et al. (1995) “Ligand-directed retro-viral targeting of human breast cancer cells”, Proc Natl Acad Sci U.S.A. 92(21):9747-51
[0173] 19. Inaba et al. (1992) “Generation of large numbers of dendritic cells from mouse bone marrow cultures supplemented with granulocyte/macrophage colony-stimulating factor”, J Exp Med. 176(6):1693-702
[0174] 20. Jinek et al. (2012) “A programmable dual-RNA-guided DNA endonuclease in adaptive bacterial immunity,” Science 337(6096):816-21
[0175] 21. Johan et al. (1992) “GLVR1, a receptor for gibbon ape leukemia virus, is homologous to a phosphate permease of Neurospora crassa and is expressed at high levels in the brain and thymus”, J Virol 66(3):1635-40
[0176] 22. Judge et al. (2006) “Design of noninflammatory synthetic siRNA mediating potent gene silencing in vivo”, Mol Ther. 13(3):494-505
[0177] 23. Kohn et al. (1995) “Engraftment of gene-modified umbilical cord blood cells in neonates with adnosine deaminase deficiency”, Nature Medicine 1:1017-23
[0178] 24. Kremer and Perricaudet (1995) “Adenovirus and adeno-associated virus mediated gene transfer”, Br. Med. Bull. 51(1):31-44
[0179] 25. Macdiarmid et al. (2009) “Sequential treatment of drug-resistant tumors with targeted minicells containing siRNA or a cytotoxic drug”, Nat Biotehcnol. 27(7):643-51
[0180] 26. Malech et al. (1997) “Prolonged production of NADPH oxidase-corrected granulocyes after gene therapy of chronic granulomatous disease”, PNAS 94(22):12133-38
[0181] 27. Miller et al. (1991) “Construction and properties of retrovirus packaging cells based on gibbon ape leukemia virus”, J Virol. 65(5):2220-24
[0182] 28. Miller (1992) “Human gene therapy comes of age”, Nature 357:455-60
[0183] 29. Mitani and Caskey (1993) “Delivering therapeutic genes—matching approach and application”, Trends in Biotechnology 11(5):162-66
[0184] 30. Nabel and Felgner (1993) “Direct gene transfer for immunotherapy and immunization”, Trends in Biotechnology 11(5):211-15
[0185] 31. Remy et al. (1994) “Gene Transfer with a Series of Lipphilic DNA-Binding Molecules”, Bioconjugate Chem. 5(6):647-54
[0186] 32. Sentmanat et al. (2018) “A Survey of Validation Strategies for CRISPR-Cas9 Editing”, Scientific Reports 8:888, doi:10.1038/s41598-018-19441-8
[0187] 33. Sommerfelt et al. (1990) “Localization of the receptor gene for type D simian retroviruses on human chromosome 19”, J. Virol. 64(12):6214-20
[0188] 34. Van Brunt (1988) “Molecular framing: transgenic animals as bioactors” Biotechnology 6:1149-54
[0189] 35. Vigne et al. (1995) “Third-generation adenovectors for gene therapy”, Restorative Neurology and Neuroscience 8(1,2): 35-36
[0190] 36. Wilson et al. (1989) “Formation of infectious hybrid virion with gibbon ape leukemia virus and human T-cell leukemia virus retroviral envelope glycoproteins and the gag and pol proteins of Moloney murine leukemia virus”, J. Virol. 63:2374-78
[0191] 37. Yu et al. (1994) “Progress towards gene therapy for HIV infection”, Gene Ther. 1(1):13-26
[0192] 38. Zetsche et al. (2015) “Cpf1 is a single RNA-guided endonuclease of a class 2 CRIPSR-Cas system” Cell 163(3):759-71
[0193] 39. Zuris et al. (2015) “Cationic lipid-mediated delivery of proteins enables efficient protein based genome editing in vitro and in vivo” Nat Biotechnol. 33(1):73-80

The application's sequence listing, which the Patent Office published only in electronic form, follows.

SEQUENCE LISTING (3010 sequences)

SEQ ID NO: 1 - RNA, 20 nt, Artificial Sequence
  synthesized
aggcuccacugagaggaagg

SEQ ID NO: 2 - RNA, 20 nt, Artificial Sequence
  synthesized
aggcucuacugagaggaagg

SEQ ID NO: 3 - RNA, 20 nt, Artificial Sequence
  synthesized
cacugagaggaaggacacgc

SEQ ID NO: 4 - RNA, 20 nt, Artificial Sequence
  synthesized
ccaaggcuccacugagagga

SEQ ID NO: 5 - RNA, 20 nt, Artificial Sequence
  synthesized
ccaaggcucuacugagagga

SEQ ID NO: 6 - RNA, 20 nt, Artificial Sequence
  synthesized
cccaaggcuccacugagagg

SEQ ID NO: 7 - RNA, 20 nt, Artificial Sequence
  synthesized
cccaaggcucuacugagagg

SEQ ID NO: 8 - RNA, 20 nt, Artificial Sequence
  synthesized
ccuuccucucaguagagccu

SEQ ID NO: 9 - RNA, 20 nt, Artificial Sequence
  synthesized
ccuuccucucaguggagccu

SEQ ID NO: 10 - RNA, 20 nt, Artificial Sequence
  synthesized
cucucaguagagccuugggg

SEQ ID NO: 11 - RNA, 20 nt, Artificial Sequence
  synthesized
cucucaguggagccuugggg

SEQ ID NO: 12 - RNA, 20 nt, Artificial Sequence
  synthesized
cuuccucucaguagagccuu

SEQ ID NO: 13 - RNA, 20 nt, Artificial Sequence
  synthesized
cuuccucucaguggagccuu

SEQ ID NO: 14 - RNA, 20 nt, Artificial Sequence
  synthesized
gccccaaggcuccacugaga

SEQ ID NO: 15 - RNA, 20 nt, Artificial Sequence
  synthesized
gccccaaggcucuacugaga

SEQ ID NO: 16 - RNA, 20 nt, Artificial Sequence
  synthesized
gcucggccccaaggcuccac

SEQ ID NO: 17 - RNA, 20 nt, Artificial Sequence
  synthesized
gcucggccccaaggcucuac

SEQ ID NO: 18 - RNA, 20 nt, Artificial Sequence
  synthesized
ggccccaaggcuccacugag

SEQ ID NO: 19 - RNA, 20 nt, Artificial Sequence
  synthesized
ggccccaaggcucuacugag

SEQ ID NO: 20 - RNA, 20 nt, Artificial Sequence
  synthesized
uacugagaggaaggacacgc

SEQ ID NO: 21 - RNA, 20 nt, Artificial Sequence
  synthesized
ucggccccaaggcuccacug

SEQ ID NO: 22 - RNA, 20 nt, Artificial Sequence
  synthesized
ucggccccaaggcucuacug

SEQ ID NO: 23 - RNA, 20 nt, Artificial Sequence
  synthesized
ucucaguagagccuuggggc

SEQ ID NO: 24 - RNA, 20 nt, Artificial Sequence
  synthesized
ucucaguggagccuuggggc

SEQ ID NO: 25 - RNA, 20 nt, Artificial Sequence
  synthesized
uuccucucaguagagccuug

SEQ ID NO: 26 - RNA, 20 nt, Artificial Sequence
  synthesized
uuccucucaguggagccuug

SEQ ID NO: 27 - RNA, 20 nt, Artificial Sequence
  synthesized
acugaggauccuggcuucuc

SEQ ID NO: 28 - RNA, 20 nt, Artificial Sequence
  synthesized
acugaggguccuggcuucuc

SEQ ID NO: 29 - RNA, 20 nt, Artificial Sequence
  synthesized
agaagccaggacccucagug

SEQ ID NO: 30 - RNA, 20 nt, Artificial Sequence
  synthesized
agaagccaggauccucagug

SEQ ID NO: 31 - RNA, 20 nt, Artificial Sequence
  synthesized
agagaagccaggacccucag

SEQ ID NO: 32 - RNA, 20 nt, Artificial Sequence
  synthesized
agagaagccaggauccucag

SEQ ID NO: 33 - RNA, 20 nt, Artificial Sequence
  synthesized
agccaggacccucaguggga

SEQ ID NO: 34 - RNA, 20 nt, Artificial Sequence
  synthesized
agccaggauccucaguggga

SEQ ID NO: 35 - RNA, 20 nt, Artificial Sequence
  synthesized
caggacccucagugggauga

SEQ ID NO: 36 - RNA, 20 nt, Artificial Sequence
  synthesized
caggauccucagugggauga

SEQ ID NO: 37 - RNA, 20 nt, Artificial Sequence
  synthesized
ccaggacccucagugggaug

SEQ ID NO: 38 - RNA, 20 nt, Artificial Sequence
  synthesized
ccaggauccucagugggaug

SEQ ID NO: 39 - RNA, 20 nt, Artificial Sequence
  synthesized
ccucaucccacugaggaucc

SEQ ID NO: 40 - RNA, 20 nt, Artificial Sequence
  synthesized
ccucaucccacugagggucc

SEQ ID NO: 41 - RNA, 20 nt, Artificial Sequence
  synthesized
gagaagccaggacccucagu

SEQ ID NO: 42 - RNA, 20 nt, Artificial Sequence
  synthesized
gagaagccaggauccucagu

SEQ ID NO: 43 - RNA, 20 nt, Artificial Sequence
  synthesized
gcagagaagccaggacccuc

SEQ ID NO: 44 - RNA, 20 nt, Artificial Sequence
  synthesized
gcagagaagccaggauccuc

SEQ ID NO: 45 - RNA, 20 nt, Artificial Sequence
  synthesized
ugaggauccuggcuucucug

SEQ ID NO: 46 - RNA, 20 nt, Artificial Sequence
  synthesized
ugaggguccuggcuucucug

SEQ ID NO: 47 - RNA, 20 nt, Artificial Sequence
  synthesized
auuuaacuguaggacuucug

SEQ ID NO: 48 - RNA, 20 nt, Artificial Sequence
  synthesized
aaauuuaacugccggacuuc

SEQ ID NO: 49 - RNA, 20 nt, Artificial Sequence
  synthesized
aaguccggcaguuaaauuua

SEQ ID NO: 50 - RNA, 20 nt, Artificial Sequence
  synthesized
aauuuaacugccggacuucu

SEQ ID NO: 51 - RNA, 20 nt, Artificial Sequence
  synthesized
auuuaacugccggacuucug

SEQ ID NO: 52 - RNA, 20 nt, Artificial Sequence
  synthesized
gucaaauaaauuuaacugcc

SEQ ID NO: 53 - RNA, 20 nt, Artificial Sequence
  synthesized
guccggcaguuaaauuuauu

SEQ ID NO: 54 - RNA, 20 nt, Artificial Sequence
  synthesized
agagaaauuaggaagaucac

SEQ ID NO: 55 - RNA, 20 nt, Artificial Sequence
  synthesized
agagaaauuaggaaggucac

SEQ ID NO: 56 - RNA, 20 nt, Artificial Sequence
  synthesized
aggaagaucacuggcacccu

SEQ ID NO: 57 - RNA, 20 nt, Artificial Sequence
  synthesized
aggaaggucacuggcacccu

SEQ ID NO: 58 - RNA, 20 nt, Artificial Sequence
  synthesized
ccugggagccccccuccaag

SEQ ID NO: 59 - RNA, 20 nt, Artificial Sequence
  synthesized
ccugggagccccccuccgag

SEQ ID NO: 60 - RNA, 20 nt, Artificial Sequence
  synthesized
gcucggaggggggcucccag

SEQ ID NO: 61 - RNA, 20 nt, Artificial Sequence
  synthesized
gcuuggaggggggcucccag

SEQ ID NO: 62 - RNA, 20 nt, Artificial Sequence
  synthesized
ggagccccccuccaagccca

SEQ ID NO: 63 - RNA, 20 nt, Artificial Sequence
  synthesized
ggagccccccuccgagccca

SEQ ID NO: 64 - RNA, 20 nt, Artificial Sequence
  synthesized
ggcucggaggggggcuccca

SEQ ID NO: 65 - RNA, 20 nt, Artificial Sequence
  synthesized
ggcuggcugggcucggaggg

SEQ ID NO: 66 - RNA, 20 nt, Artificial Sequence
  synthesized
ggcuuggaggggggcuccca

SEQ ID NO: 67 - RNA, 20 nt, Artificial Sequence
  synthesized
gggcuuggaggggggcuccc

SEQ ID NO: 68 - RNA, 20 nt, Artificial Sequence
  synthesized
uggcuggcugggcucggagg

SEQ ID NO: 69 - RNA, 20 nt, Artificial Sequence
  synthesized
ugggcucggaggggggcucc

SEQ ID NO: 70 - RNA, 20 nt, Artificial Sequence
  synthesized
ugggcuuggaggggggcucc

SEQ ID NO: 71 - RNA, 20 nt, Artificial Sequence
  synthesized
gaagagaaauuaggaagauc

SEQ ID NO: 72 - RNA, 20 nt, Artificial Sequence
  synthesized
gaagagaaauuaggaagguc

SEQ ID NO: 73 - RNA, 20 nt, Artificial Sequence
  synthesized
aagaguggguccccccaacc

SEQ ID NO: 74 - RNA, 20 nt, Artificial Sequence
  synthesized
aagaguggguccccccaccc

SEQ ID NO: 75 - RNA, 20 nt, Artificial Sequence
  synthesized
aggaggcuguggagucuggg

SEQ ID NO: 76 - RNA, 20 nt, Artificial Sequence
  synthesized
aggaggcuguggagucuggu

SEQ ID NO: 77 - RNA, 20 nt, Artificial Sequence
  synthesized
aggcuguggagucugggugg

SEQ ID NO: 78 - RNA, 20 nt, Artificial Sequence
  synthesized
aggcuguggagucugguugg

SEQ ID NO: 79 - RNA, 20 nt, Artificial Sequence
  synthesized
aguggguccccccaaccaga

SEQ ID NO: 80 - RNA, 20 nt, Artificial Sequence
  synthesized
aguggguccccccacccaga

SEQ ID NO: 81 - RNA, 20 nt, Artificial Sequence
  synthesized
gaggcuguggagucugggug

SEQ ID NO: 82 - RNA, 20 nt, Artificial Sequence
  synthesized
gaggcuguggagucugguug

SEQ ID NO: 83 - RNA, 20 nt, Artificial Sequence
  synthesized
gcuguggagucugggugggg

SEQ ID NO: 84 - RNA, 20 nt, Artificial Sequence
  synthesized
gcuguggagucugguugggg

SEQ ID NO: 85 - RNA, 20 nt, Artificial Sequence
  synthesized
ggaggcuguggagucugguu

SEQ ID NO: 86 - RNA, 20 nt, Artificial Sequence
  synthesized
ggcuguggagucuggguggg

SEQ ID NO: 87 - RNA, 20 nt, Artificial Sequence
  synthesized
ggcuguggagucugguuggg

SEQ ID NO: 88 - RNA, 20 nt, Artificial Sequence
  synthesized
ggguccccccaaccagacuc

SEQ ID NO: 89 - RNA, 20 nt, Artificial Sequence
  synthesized
ggguccccccacccagacuc

SEQ ID NO: 90 - RNA, 20 nt, Artificial Sequence
  synthesized
ucuggguggggggacccacu

SEQ ID NO: 91 - RNA, 20 nt, Artificial Sequence
  synthesized
ucugguuggggggacccacu

SEQ ID NO: 92 - RNA, 20 nt, Artificial Sequence
  synthesized
uggguggggggacccacucu

SEQ ID NO: 93 - RNA, 20 nt, Artificial Sequence
  synthesized
ugguuggggggacccacucu

SEQ ID NO: 94 - RNA, 20 nt, Artificial Sequence
  synthesized
aauaaggcagccacucccaa

SEQ ID NO: 95 - RNA, 20 nt, Artificial Sequence
  synthesized
aauaaggcaggcacucccaa

SEQ ID NO: 96 - RNA, 20 nt, Artificial Sequence
  synthesized
agugccugccuuauuguaga

SEQ ID NO: 97 - RNA, 20 nt, Artificial Sequence
  synthesized
aguggcugccuuauuguaga

SEQ ID NO: 98 - RNA, 20 nt, Artificial Sequence
  synthesized
cuacaauaaggcagccacuc

SEQ ID NO: 99 - RNA, 20 nt, Artificial Sequence
  synthesized
cuacaauaaggcaggcacuc

SEQ ID NO: 100 - RNA, 20 nt, Artificial Sequence
  synthesized
gaguggcugccuuauuguag

SEQ ID NO: 101 - RNA, 20 nt, Artificial Sequence
  synthesized
gggagugccugccuuauugu

SEQ ID NO: 102 - RNA, 20 nt, Artificial Sequence
  synthesized
gggaguggcugccuuauugu

SEQ ID NO: 103 - RNA, 20 nt, Artificial Sequence
  synthesized
aaaacacagacuguuacauc

SEQ ID NO: 104 - RNA, 20 nt, Artificial Sequence
  synthesized
aaaacacagacuguuccauc

SEQ ID NO: 105 - RNA, 20 nt, Artificial Sequence
  synthesized
aacacagacuguuacaucug

SEQ ID NO: 106 - RNA, 20 nt, Artificial Sequence
  synthesized
aacacagacuguuccaucug

SEQ ID NO: 107 - RNA, 20 nt, Artificial Sequence
  synthesized
acuguuacaucugugugcag

SEQ ID NO: 108 - RNA, 20 nt, Artificial Sequence
  synthesized
acuguuccaucugugugcag

SEQ ID NO: 109 - RNA, 20 nt, Artificial Sequence
  synthesized
agacuguuacaucugugugc

SEQ ID NO: 110 - RNA, 20 nt, Artificial Sequence
  synthesized
agacuguuccaucugugugc

SEQ ID NO: 111 - RNA, 20 nt, Artificial Sequence
  synthesized
cuguuacaucugugugcaga

SEQ ID NO: 112 - RNA, 20 nt, Artificial Sequence
  synthesized
cuguuccaucugugugcaga

SEQ ID NO: 113 - RNA, 20 nt, Artificial Sequence
  synthesized
gauggaacagucuguguuuu

SEQ ID NO: 114 - RNA, 20 nt, Artificial Sequence
  synthesized
guuacaucugugugcagagg

SEQ ID NO: 115 - RNA, 20 nt, Artificial Sequence
  synthesized
guuccaucugugugcagagg

SEQ ID NO: 116 - RNA, 20 nt, Artificial Sequence
  synthesized
uccaucugugugcagagggg

SEQ ID NO: 117 - RNA, 20 nt, Artificial Sequence
  synthesized
uccccucugcacacagaugg

SEQ ID NO: 118 - RNA, 20 nt, Artificial Sequence
  synthesized
uccccucugcacacagaugu

SEQ ID NO: 119 - RNA, 20 nt, Artificial Sequence
  synthesized
ugcacacagauggaacaguc

SEQ ID NO: 120 - RNA, 20 nt, Artificial Sequence
  synthesized
ugcacacagauguaacaguc

SEQ ID NO: 121 - RNA, 20 nt, Artificial Sequence
  synthesized
uggaacagucuguguuuucc

SEQ ID NO: 122 - RNA, 20 nt, Artificial Sequence
  synthesized
uguaacagucuguguuuucc

SEQ ID NO: 123 - RNA, 20 nt, Artificial Sequence
  synthesized
uguuacaucugugugcagag

SEQ ID NO: 124 - RNA, 20 nt, Artificial Sequence
  synthesized
uguuccaucugugugcagag

SEQ ID NO: 125 - RNA, 20 nt, Artificial Sequence
  synthesized
aggggcagcaugcauggccg

SEQ ID NO: 126 - RNA, 20 nt, Artificial Sequence
  synthesized
aggggcagcauguauggccg

SEQ ID NO: 127 - RNA, 20 nt, Artificial Sequence
  synthesized
augcauggccgugaagacca

SEQ ID NO: 128 - RNA, 20 nt, Artificial Sequence
  synthesized
auguauggccgugaagacca

SEQ ID NO: 129 - RNA, 20 nt, Artificial Sequence
  synthesized
caugcauggccgugaagacc

SEQ ID NO: 130 - RNA, 20 nt, Artificial Sequence
  synthesized
cauguauggccgugaagacc

SEQ ID NO: 131 - RNA, 20 nt, Artificial Sequence
  synthesized
gaaggcaggggcagcaugca

SEQ ID NO: 132 - RNA, 20 nt, Artificial Sequence
  synthesized
gaaggcaggggcagcaugua

SEQ ID NO: 133 - RNA, 20 nt, Artificial Sequence
  synthesized
gcaggggcagcaugcauggc

SEQ ID NO: 134 - RNA, 20 nt, Artificial Sequence
  synthesized
gcaggggcagcauguauggc

SEQ ID NO: 135 - RNA, 20 nt, Artificial Sequence
  synthesized
gcauggccgugaagaccacg

SEQ ID NO: 136 - RNA, 20 nt, Artificial Sequence
  synthesized
ggcagcaugcauggccguga

SEQ ID NO: 137 - RNA, 20 nt, Artificial Sequence
  synthesized
ggcagcauguauggccguga

SEQ ID NO: 138 - RNA, 20 nt, Artificial Sequence
  synthesized
ggggcagcaugcauggccgu

SEQ ID NO: 139 - RNA, 20 nt, Artificial Sequence
  synthesized
ggggcagcauguauggccgu

SEQ ID NO: 140 - RNA, 20 nt, Artificial Sequence
  synthesized
ugcauggccgugaagaccac

SEQ ID NO: 141 - RNA, 20 nt, Artificial Sequence
  synthesized
uguauggccgugaagaccac

SEQ ID NO: 142 - RNA, 20 nt, Artificial Sequence
  synthesized
agggaacaacagcccuuccu

SEQ ID NO: 143 - RNA, 20 nt, Artificial Sequence
  synthesized
aggggacaacagcccuuccu

SEQ ID NO: 144 - RNA, 20 nt, Artificial Sequence
  synthesized
aggugggggucucagggaac

SEQ ID NO: 145 - RNA, 20 nt, Artificial Sequence
  synthesized
aggugggggucucaggggac

SEQ ID NO: 146 - RNA, 20 nt, Artificial Sequence
  synthesized
gaggaagggcuguugucccc

SEQ ID NO: 147 - RNA, 20 nt, Artificial Sequence
  synthesized
gaggaagggcuguuguuccc

SEQ ID NO: 148 - RNA, 20 nt, Artificial Sequence
  synthesized
ggaagggcuguuguucccug

SEQ ID NO: 149 - RNA, 20 nt, Artificial Sequence
  synthesized
gggcuguuguccccugagac

SEQ ID NO: 150 - RNA, 20 nt, Artificial Sequence
  synthesized
gggcuguuguucccugagac

SEQ ID NO: 151 - RNA, 20 nt, Artificial Sequence
  synthesized
guuguccccugagaccccca

SEQ ID NO: 152 - RNA, 20 nt, Artificial Sequence
  synthesized
guuguucccugagaccccca

SEQ ID NO: 153 - RNA, 20 nt, Artificial Sequence
  synthesized
agggguuggcugcuuaugua

SEQ ID NO: 154 - RNA, 20 nt, Artificial Sequence
  synthesized
cuuacauaagcagccaaccc

SEQ ID NO: 155 - RNA, 20 nt, Artificial Sequence
  synthesized
uaagcagccaaccccugggc

SEQ ID NO: 156 - RNA, 20 nt, Artificial Sequence
  synthesized
uaagcggccaaccccugggc

SEQ ID NO: 157 - RNA, 20 nt, Artificial Sequence
  synthesized
uacauaagcagccaaccccu

SEQ ID NO: 158 - RNA, 20 nt, Artificial Sequence
  synthesized
uuacauaagcagccaacccc

SEQ ID NO: 159 - RNA, 20 nt, Artificial Sequence
  synthesized
auaaagugaagaucgcgcag

SEQ ID NO: 160 - RNA, 20 nt, Artificial Sequence
  synthesized
gauaaagugaagaucgcgca

SEQ ID NO: 161 - RNA, 20 nt, Artificial Sequence
  synthesized
ggauaaagugaagaucgcgc

SEQ ID NO: 162 - RNA, 20 nt, Artificial Sequence
  synthesized
agaagccaguaaaauuaugg

SEQ ID NO: 163 - RNA, 20 nt, Artificial Sequence
  synthesized
agaagccagugaaauuaugg

SEQ ID NO: 164 - RNA, 20 nt, Artificial Sequence
  synthesized
auagaagccagugaaauuau

SEQ ID NO: 165 - RNA, 20 nt, Artificial Sequence
  synthesized
ccagugaaauuauggagauu

SEQ ID NO: 166 - RNA, 20 nt, Artificial Sequence
  synthesized
gauagaagccaguaaaauua

SEQ ID NO: 167 - RNA, 20 nt, Artificial Sequence
  synthesized
gauagaagccagugaaauua

SEQ ID NO: 168 - RNA, 20 nt, Artificial Sequence
  synthesized
ucaaaucuccauaauuucac

SEQ ID NO: 169 - RNA, 20 nt, Artificial Sequence
  synthesized
aaaacuucccaaucuugaug

SEQ ID NO: 170 - RNA, 20 nt, Artificial Sequence
  synthesized
aaaacuucucaaucuugaug

SEQ ID NO: 171 - RNA, 20 nt, Artificial Sequence
  synthesized
aaacuucccaaucuugaugg

SEQ ID NO: 172 - RNA, 20 nt, Artificial Sequence
  synthesized
aaacuucucaaucuugaugg

SEQ ID NO: 173 - RNA, 20 nt, Artificial Sequence
  synthesized
acuucccaaucuugaugggg

SEQ ID NO: 174 - RNA, 20 nt, Artificial Sequence
  synthesized
acuucucaaucuugaugggg

SEQ ID NO: 175 - RNA, 20 nt, Artificial Sequence
  synthesized
agauugagaaguuuucaaag

SEQ ID NO: 176 - RNA, 20 nt, Artificial Sequence
  synthesized
agauugggaaguuuucaaag

SEQ ID NO: 177 - RNA, 20 nt, Artificial Sequence
  synthesized
aucaagauugagaaguuuuc

SEQ ID NO: 178 - RNA, 20 nt, Artificial Sequence
  synthesized
aucaagauugggaaguuuuc

SEQ ID NO: 179 - RNA, 20 nt, Artificial Sequence
  synthesized
auugagaaguuuucaaaggc

SEQ ID NO: 180 - RNA, 20 nt, Artificial Sequence
  synthesized
auugggaaguuuucaaaggc

SEQ ID NO: 181 - RNA, 20 nt, Artificial Sequence
  synthesized
caagauugagaaguuuucaa

SEQ ID NO: 182 - RNA, 20 nt, Artificial Sequence
  synthesized
caagauugggaaguuuucaa

SEQ ID NO: 183 - RNA, 20 nt, Artificial Sequence
  synthesized
cuuugaaaacuucccaaucu

SEQ ID NO: 184 - RNA, 20 nt, Artificial Sequence
  synthesized
cuuugaaaacuucucaaucu

SEQ ID NO: 185 - RNA, 20 nt, Artificial Sequence
  synthesized
gaaaacuucucaaucuugau

SEQ ID NO: 186 - RNA, 20 nt, Artificial Sequence
  synthesized
ugaaaacuucucaaucuuga

SEQ ID NO: 187 - RNA, 20 nt, Artificial Sequence
  synthesized
cugucaucuuucuuuccaag

SEQ ID NO: 188 - RNA, 20 nt, Artificial Sequence
  synthesized
gaaagaaaaaugacagacac

SEQ ID NO: 189 - RNA, 20 nt, Artificial Sequence
  synthesized
ggaaagaaaaaugacagaca

SEQ ID NO: 190 - RNA, 20 nt, Artificial Sequence
  synthesized
ggaaagaaagaugacagaca

SEQ ID NO: 191 - RNA, 20 nt, Artificial Sequence
  synthesized
gucaucuuucuuuccaagua

SEQ ID NO: 192 - RNA, 20 nt, Artificial Sequence
  synthesized
gucauuuuucuuuccaagua

SEQ ID NO: 193 - RNA, 20 nt, Artificial Sequence
  synthesized
guucuacuuggaaagaaaaa

SEQ ID NO: 194 - RNA, 20 nt, Artificial Sequence
  synthesized
guucuacuuggaaagaaaga

SEQ ID NO: 195 - RNA, 20 nt, Artificial Sequence
  synthesized
uacuuggaaagaaaaaugac

SEQ ID NO: 196 - RNA, 20 nt, Artificial Sequence
  synthesized
ucuacuuggaaagaaagaug

SEQ ID NO: 197 - RNA, 20 nt, Artificial Sequence
  synthesized
ugucaucuuucuuuccaagu

SEQ ID NO: 198 - RNA, 20 nt, Artificial Sequence
  synthesized
ugugucugucaucuuucuuu

SEQ ID NO: 199 - RNA, 20 nt, Artificial Sequence
  synthesized
ugugucugucauuuuucuuu

SEQ ID NO: 200 - RNA, 20 nt, Artificial Sequence
  synthesized
aaagacagcgaaaggucuac

SEQ ID NO: 201 - RNA, 20 nt, Artificial Sequence
  synthesized
aaagacagcgaaaggucugc

SEQ ID NO: 202 - RNA, 20 nt, Artificial Sequence
  synthesized
aagacagcgaaaggucuacu

SEQ ID NO: 203 - RNA, 20 nt, Artificial Sequence
  synthesized
aagacagcgaaaggucugcu

SEQ ID NO: 204 - RNA, 20 nt, Artificial Sequence
  synthesized
aaggucuacugggguaccau

SEQ ID NO: 205 - RNA, 20 nt, Artificial Sequence
  synthesized
aaggucugcugggguaccau

SEQ ID NO: 206 - RNA, 20 nt, Artificial Sequence
  synthesized
acugggguaccaucaaggua

SEQ ID NO: 207 - RNA, 20 nt, Artificial Sequence
  synthesized
agacagcgaaaggucuacug

SEQ ID NO: 208 - RNA, 20 nt, Artificial Sequence
  synthesized
agacagcgaaaggucugcug

SEQ ID NO: 209 - RNA, 20 nt, Artificial Sequence
  synthesized
agcagaccuuucgcugucuu

SEQ ID NO: 210 - RNA, 20 nt, Artificial Sequence
  synthesized
aguagaccuuucgcugucuu

SEQ ID NO: 211 - RNA, 20 nt, Artificial Sequence
  synthesized
cagcgaaaggucuacugggg

SEQ ID NO: 212 - RNA, 20 nt, Artificial Sequence
  synthesized
cagcgaaaggucugcugggg

SEQ ID NO: 213 - RNA, 20 nt, Artificial Sequence
  synthesized
gcugggguaccaucaaggua

SEQ ID NO: 214 - RNA, 20 nt, Artificial Sequence
  synthesized
ggucuacugggguaccauca

SEQ ID NO: 215 - RNA, 20 nt, Artificial Sequence
  synthesized
ggucugcugggguaccauca

SEQ ID NO: 216 - RNA, 20 nt, Artificial Sequence
  synthesized
gucuacugggguaccaucaa

SEQ ID NO: 217 - RNA, 20 nt, Artificial Sequence
  synthesized
gucugcugggguaccaucaa

SEQ ID NO: 218 - RNA, 20 nt, Artificial Sequence
  synthesized
uaccuugaugguaccccagc

SEQ ID NO: 219 - RNA, 20 nt, Artificial Sequence
  synthesized
uaccuugaugguaccccagu

SEQ ID NO: 220 - RNA, 20 nt, Artificial Sequence
  synthesized
agaguguuaacgggaaauca

SEQ ID NO: 221 - RNA, 20 nt, Artificial Sequence
  synthesized
ugauuucccauuaacacucu

SEQ ID NO: 222 - RNA, 20 nt, Artificial Sequence
  synthesized
ugauuucccguuaacacucu

SEQ ID NO: 223 - RNA, 20 nt, Artificial Sequence
  synthesized
acuaggcaccuacuugucuc

SEQ ID NO: 224 - RNA, 20 nt, Artificial Sequence
  synthesized
augaauauuuguuaaguggg

SEQ ID NO: 225 - RNA, 20 nt, Artificial Sequence
  synthesized
auuaggcaccuacuugucuc

SEQ ID NO: 226 - RNA, 20 nt, Artificial Sequence
  synthesized
ucacuaggcaccuacuuguc

SEQ ID NO: 227 - RNA, 20 nt, Artificial Sequence
  synthesized
ucauuaggcaccuacuuguc

SEQ ID NO: 228 - RNA, 20 nt, Artificial Sequence
  synthesized
ugagacaaguaggugccuaa

SEQ ID NO: 229 - RNA, 20 nt, Artificial Sequence
  synthesized
ugagacaaguaggugccuag

SEQ ID NO: 230 - RNA, 20 nt, Artificial Sequence
  synthesized
cccucucggcugagggacug

SEQ ID NO: 231 - RNA, 20 nt, Artificial Sequence
  synthesized
gaggggcugucacucucggc

SEQ ID NO: 232 - RNA, 20 nt, Artificial Sequence
  synthesized
gaggggcugucccucucggc

SEQ ID NO: 233 - RNA, 20 nt, Artificial Sequence
  synthesized
gccgagagggacagccccuc

SEQ ID NO: 234 - RNA, 20 nt, Artificial Sequence
  synthesized
gccgagagugacagccccuc

SEQ ID NO: 235 - RNA, 20 nt, Artificial Sequence
  synthesized
ggcugucacucucggcugag

SEQ ID NO: 236 - RNA, 20 nt, Artificial Sequence
  synthesized
ggcugucccucucggcugag

SEQ ID NO: 237 - RNA, 20 nt, Artificial Sequence
  synthesized
gggcugucacucucggcuga

SEQ ID NO: 238 - RNA, 20 nt, Artificial Sequence
  synthesized
gggcugucccucucggcuga

SEQ ID NO: 239 - RNA, 20 nt, Artificial Sequence
  synthesized
ggggcugucacucucggcug

SEQ ID NO: 240 - RNA, 20 nt, Artificial Sequence
  synthesized
ggggcugucccucucggcug

SEQ ID NO: 241 - RNA, 20 nt, Artificial Sequence
  synthesized
gucacucucggcugagggac

SEQ ID NO: 242 - RNA, 20 nt, Artificial Sequence
  synthesized
gucagaggggcugucacucu

SEQ ID NO: 243 - RNA, 20 nt, Artificial Sequence
  synthesized
gucagaggggcugucccucu

SEQ ID NO: 244 - RNA, 20 nt, Artificial Sequence
  synthesized
gucccucucggcugagggac

SEQ ID NO: 245 - RNA, 20 nt, Artificial Sequence
  synthesized
ucagucccucagccgagagg

SEQ ID NO: 246 - RNA, 20 nt, Artificial Sequence
  synthesized
ucagucccucagccgagagu

SEQ ID NO: 247 - RNA, 20 nt, Artificial Sequence
  synthesized
agcuccucuguggggcagcu

SEQ ID NO: 248 - RNA, 20 nt, Artificial Sequence
  synthesized
auucccagaagcagcuccuc

SEQ ID NO: 249 - RNA, 20 nt, Artificial Sequence
  synthesized
auucccagaagcagcugcuc

SEQ ID NO: 250 - RNA, 20 nt, Artificial Sequence
  synthesized
agcccggucgagucccgagg

SEQ ID NO: 251 - RNA, 20 nt, Artificial Sequence
  synthesized
agcgcagcccggucgagucc

SEQ ID NO: 252 - RNA, 20 nt, Artificial Sequence
  synthesized
agcgccgcccggucgagucc

SEQ ID NO: 253 - RNA, 20 nt, Artificial Sequence
  synthesized
cgaccgggcggcgcucacug

SEQ ID NO: 254 - RNA, 20 nt, Artificial Sequence
  synthesized
cgaccgggcugcgcucacug

SEQ ID NO: 255 - RNA, 20 nt, Artificial Sequence
  synthesized
cgcagcccggucgagucccg

SEQ ID NO: 256 - RNA, 20 nt, Artificial Sequence
  synthesized
cgcccggucgagucccgagg

SEQ ID NO: 257 - RNA, 20 nt, Artificial Sequence
  synthesized
cggcgcucacugcccagccg

SEQ ID NO: 258 - RNA, 20 nt, Artificial Sequence
  synthesized
cggcugggcagugagcgcag

SEQ ID NO: 259 - RNA, 20 nt, Artificial Sequence
  synthesized
cggcugggcagugagcgccg

SEQ ID NO: 260 - RNA, 20 nt, Artificial Sequence
  synthesized
cugcgcucacugcccagccg

SEQ ID NO: 261 - RNA, 20 nt, Artificial Sequence
  synthesized
gcagcccggucgagucccga

SEQ ID NO: 262 - RNA, 20 nt, Artificial Sequence
  synthesized
gccgcccggucgagucccga

SEQ ID NO: 263 - RNA, 20 nt, Artificial Sequence
  synthesized
gcggcgcucacugcccagcc

SEQ ID NO: 264 - RNA, 20 nt, Artificial Sequence
  synthesized
gcugcgcucacugcccagcc

SEQ ID NO: 265 - RNA, 20 nt, Artificial Sequence
  synthesized
gcugggcagugagcgcagcc

SEQ ID NO: 266 - RNA, 20 nt, Artificial Sequence
  synthesized
gcugggcagugagcgccgcc

SEQ ID NO: 267 - RNA, 20 nt, Artificial Sequence
  synthesized
ggcagugagcgcagcccggu

SEQ ID NO: 268 - RNA, 20 nt, Artificial Sequence
  synthesized
ggcagugagcgccgcccggu

SEQ ID NO: 269 - RNA, 20 nt, Artificial Sequence
  synthesized
ggcggcgcucacugcccagc

SEQ ID NO: 270 - RNA, 20 nt, Artificial Sequence
  synthesized
ggcugcgcucacugcccagc

SEQ ID NO: 271 - RNA, 20 nt, Artificial Sequence
  synthesized
gggcagugagcgcagcccgg

SEQ ID NO: 272 - RNA, 20 nt, Artificial Sequence
  synthesized
ccacagagcagcugcuucug

SEQ ID NO: 273 - RNA, 20 nt, Artificial Sequence
  synthesized
ccacagaggagcugcuucug

SEQ ID NO: 274 - RNA, 20 nt, Artificial Sequence
  synthesized
ccagaagcagcugcucugug

SEQ ID NO: 275 - RNA, 20 nt, Artificial Sequence
  synthesized
cccacagagcagcugcuucu

SEQ ID NO: 276 - RNA, 20 nt, Artificial Sequence
  synthesized
cccagaagcagcugcucugu

SEQ ID NO: 277 - RNA, 20 nt, Artificial Sequence
  synthesized
ccccacagagcagcugcuuc

SEQ ID NO: 278 - RNA, 20 nt, Artificial Sequence
  synthesized
cuccucuguggggcagcugu

SEQ ID NO: 279 - RNA, 20 nt, Artificial Sequence
  synthesized
cugcucuguggggcagcugu

SEQ ID NO: 280 - RNA, 20 nt, Artificial Sequence
  synthesized
gagcugcuucugggaauccu

SEQ ID NO: 281 - RNA, 20 nt, Artificial Sequence
  synthesized
gcuccucuguggggcagcug

SEQ ID NO: 282 - RNA, 20 nt, Artificial Sequence
  synthesized
ucccagaagcagcugcucug

SEQ ID NO: 283 - RNA, 20 nt, Artificial Sequence
  synthesized
aacuggacacacuuacaccu

SEQ ID NO: 284 - RNA, 20 nt, Artificial Sequence
  synthesized
accaguccaacuggacacac

SEQ ID NO: 285 - RNA, 20 nt, Artificial Sequence
  synthesized
agguguaaguguguccaguu

SEQ ID NO: 286 - RNA, 20 nt, Artificial Sequence
  synthesized
gagguguaaguguguccagu

SEQ ID NO: 287 - RNA, 20 nt, Artificial Sequence
  synthesized
guaaguguguccaguuggac

SEQ ID NO: 288 - RNA, 20 nt, Artificial Sequence
  synthesized
guguaaguguguccaguugg

SEQ ID NO: 289 - RNA, 20 nt, Artificial Sequence
  synthesized
guguccaguuggacugguca

SEQ ID NO: 290 - RNA, 20 nt, Artificial Sequence
  synthesized
uggacacacuuacaccucuu

SEQ ID NO: 291 - RNA, 20 nt, Artificial Sequence
  synthesized
uguguccaguuggacugguc

SEQ ID NO: 292 - RNA, 20 nt, Artificial Sequence
  synthesized
caguggcccgaucucgcuuc

SEQ ID NO: 293 - RNA, 20 nt, Artificial Sequence
  synthesized
uggcccgaucucgcuucagu

SEQ ID NO: 294 - RNA, 20 nt, Artificial Sequence
  synthesized
aaagaccccuaccagcuggg

SEQ ID NO: 295 - RNA, 20 nt, Artificial Sequence
  synthesized
aaagacuccuaccagcuggg

SEQ ID NO: 296 - RNA, 20 nt, Artificial Sequence
  synthesized
agaccccuaccagcugggcg

SEQ ID NO: 297 - RNA, 20 nt, Artificial Sequence
  synthesized
agacuccuaccagcugggcg

SEQ ID NO: 298 - RNA, 20 nt, Artificial Sequence
  synthesized
gaaaagaccccuaccagcug

SEQ ID NO: 299 - RNA, 20 nt, Artificial Sequence
  synthesized
gaaaagacuccuaccagcug

SEQ ID NO: 300 - RNA, 20 nt, Artificial Sequence
  synthesized
gcccagcugguaggagucuu

SEQ ID NO: 301 - RNA, 20 nt, Artificial Sequence
  synthesized
gcccagcugguaggggucuu

SEQ ID NO: 302 - RNA, 20 nt, Artificial Sequence
  synthesized
ugaaaagaccccuaccagcu

SEQ ID NO: 303 - RNA, 20 nt, Artificial Sequence
  synthesized
ugaaaagacuccuaccagcu

SEQ ID NO: 304 - RNA, 20 nt, Artificial Sequence
  synthesized
uugaaaagaccccuaccagc

SEQ ID NO: 305 - RNA, 20 nt, Artificial Sequence
  synthesized
uugaaaagacuccuaccagc

SEQ ID NO: 306 - RNA, 20 nt, Artificial Sequence
  synthesized
accaaccugugggcagggag

SEQ ID NO: 307 - RNA, 20 nt, Artificial Sequence
  synthesized
accaacuugugggcagggag

SEQ ID NO: 308 - RNA, 20 nt, Artificial Sequence
  synthesized
accaauaccaaccugugggc

SEQ ID NO: 309 - RNA, 20 nt, Artificial Sequence
  synthesized
accaauaccaacuugugggc

SEQ ID NO: 310 - RNA, 20 nt, Artificial Sequence
  synthesized
aggggcaccaauaccaaccu

SEQ ID NO: 311 - RNA, 20 nt, Artificial Sequence
  synthesized
aggggcaccaauaccaacuu

SEQ ID NO: 312 - RNA, 20 nt, Artificial Sequence
  synthesized
auaccaaccugugggcaggg

SEQ ID NO: 313 - RNA, 20 nt, Artificial Sequence
  synthesized
auaccaacuugugggcaggg

SEQ ID NO: 314 - RNA, 20 nt, Artificial Sequence
  synthesized
caauaccaaccugugggcag

SEQ ID NO: 315 - RNA, 20 nt, Artificial Sequence
  synthesized
caauaccaacuugugggcag

SEQ ID NO: 316 - RNA, 20 nt, Artificial Sequence
  synthesized
ccaauaccaaccugugggca

SEQ ID NO: 317 - RNA, 20 nt, Artificial Sequence
  synthesized
ccaauaccaacuugugggca

SEQ ID NO: 318 - RNA, 20 nt, Artificial Sequence
  synthesized
cccugcccacaaguugguau

SEQ ID NO: 319 - RNA, 20 nt, Artificial Sequence
  synthesized
cccugcccacagguugguau

SEQ ID NO: 320 - RNA, 20 nt, Artificial Sequence
  synthesized
ccugcccacaaguugguauu

SEQ ID NO: 321 - RNA, 20 nt, Artificial Sequence
  synthesized
ccugcccacagguugguauu

SEQ ID NO: 322 - RNA, 20 nt, Artificial Sequence
  synthesized
gaggggcaccaauaccaacc

SEQ ID NO: 323 - RNA, 20 nt, Artificial Sequence
  synthesized
gaggggcaccaauaccaacu

SEQ ID NO: 324 - RNA, 20 nt, Artificial Sequence
  synthesized
gggcaccaauaccaaccugu

SEQ ID NO: 325 - RNA, 20 nt, Artificial Sequence
  synthesized
gggcaccaauaccaacuugu

SEQ ID NO: 326 - RNA, 20 nt, Artificial Sequence
  synthesized
ggggcaccaauaccaaccug

SEQ ID NO: 327 - RNA, 20 nt, Artificial Sequence
  synthesized
ggggcaccaauaccaacuug

SEQ ID NO: 328 - RNA, 20 nt, Artificial Sequence
  synthesized
gucccucccugcccacaagu

SEQ ID NO: 329 - RNA, 20 nt, Artificial Sequence
  synthesized
gucccucccugcccacaggu

SEQ ID NO: 330 - RNA, 20 nt, Artificial Sequence
  synthesized
gugucccucccugcccacaa

SEQ ID NO: 331 - RNA, 20 nt, Artificial Sequence
  synthesized
gugucccucccugcccacag

SEQ ID NO: 332 - RNA, 20 nt, Artificial Sequence
  synthesized
uaccaaccugugggcaggga

SEQ ID NO: 333 - RNA, 20 nt, Artificial Sequence
  synthesized
uaccaacuugugggcaggga

SEQ ID NO: 334 - RNA, 20 nt, Artificial Sequence
  synthesized
aaaaacccugccuggccggc

SEQ ID NO: 335 - RNA, 20 nt, Artificial Sequence
  synthesized
aaaaacccugccuggcuggc

SEQ ID NO: 336 - RNA, 20 nt, Artificial Sequence
  synthesized
aaaacccugccuggccggca

SEQ ID NO: 337 - RNA, 20 nt, Artificial Sequence
  synthesized
aaaacccugccuggcuggca

SEQ ID NO: 338 - RNA, 20 nt, Artificial Sequence
  synthesized
aaacccugccuggccggcaa

SEQ ID NO: 339 - RNA, 20 nt, Artificial Sequence
  synthesized
agauccuugccggccaggca

SEQ ID NO: 340 - RNA, 20 nt, Artificial Sequence
  synthesized
caaggagauccuugccagcc

SEQ ID NO: 341 - RNA, 20 nt, Artificial Sequence
  synthesized
caaggagauccuugccggcc

SEQ ID NO: 342 - RNA, 20 nt, Artificial Sequence
  synthesized
cggcaaggaucuccuugucc

SEQ ID NO: 343 - RNA, 20 nt, Artificial Sequence
  synthesized
gacaaggagauccuugccag

SEQ ID NO: 344 - RNA, 20 nt, Artificial Sequence
  synthesized
gacaaggagauccuugccgg

SEQ ID NO: 345 - RNA, 20 nt, Artificial Sequence
  synthesized
gagauccuugccggccaggc

SEQ ID NO: 346 - RNA, 20 nt, Artificial Sequence
  synthesized
uggcaaggaucuccuugucc

SEQ ID NO: 347 - RNA, 20 nt, Artificial Sequence
  synthesized
acuguuaucauugugaaagg

SEQ ID NO: 348 - RNA, 20 nt, Artificial Sequence
  synthesized
caaucaccuuucacaaugau

SEQ ID NO: 349 - RNA, 20 nt, Artificial Sequence
  synthesized
ccuuucacaaugauaacagu

SEQ ID NO: 350 - RNA, 20 nt, Artificial Sequence
  synthesized
cuacuguuaucauugugaaa

SEQ ID NO: 351 - RNA, 20 nt, Artificial Sequence
  synthesized
cuuucacaaugauaacagua

SEQ ID NO: 352 - RNA, 20 nt, Artificial Sequence
  synthesized
gguguucaaucaccuuucac

SEQ ID NO: 353 - RNA, 20 nt, Artificial Sequence
  synthesized
guuaucauugugaaagguga

SEQ ID NO: 354 - RNA, 20 nt, Artificial Sequence
  synthesized
guucaaucaccuuucacaau

SEQ ID NO: 355 - RNA, 20 nt, Artificial Sequence
  synthesized
uaucauugugaaaggugauu

SEQ ID NO: 356 - RNA, 20 nt, Artificial Sequence
  synthesized
uguucaaucaccuuucacaa

SEQ ID NO: 357 - RNA, 20 nt, Artificial Sequence
  synthesized
uuaucauugugaaaggugau

SEQ ID NO: 358 - RNA, 20 nt, Artificial Sequence
  synthesized
uugugaaaggugauugaaca

SEQ ID NO: 359 - RNA, 20 nt, Artificial Sequence
  synthesized
uugugaacggugauugaaca

SEQ ID NO: 360 - RNA, 20 nt, Artificial Sequence
  synthesized
acacuaggaugggccacggu

SEQ ID NO: 361 - RNA, 20 nt, Artificial Sequence
  synthesized
acacuagggugggccacggu

SEQ ID NO: 362 - RNA, 20 nt, Artificial Sequence
  synthesized
accaacacuaggaugggcca

SEQ ID NO: 363 - RNA, 20 nt, Artificial Sequence
  synthesized
accaacacuagggugggcca

SEQ ID NO: 364 - RNA, 20 nt, Artificial Sequence
  synthesized
accguggcccacccuagugu

SEQ ID NO: 365 - RNA, 20 nt, Artificial Sequence
  synthesized
accguggcccauccuagugu

SEQ ID NO: 366 - RNA, 20 nt, Artificial Sequence
  synthesized
ccaacacuaggaugggccac

SEQ ID NO: 367 - RNA, 20 nt, Artificial Sequence
  synthesized
ccaacacuagggugggccac

SEQ ID NO: 368 - RNA, 20 nt, Artificial Sequence
  synthesized
cuaccaacacuaggaugggc

SEQ ID NO: 369 - RNA, 20 nt, Artificial Sequence
  synthesized
cuaccaacacuagggugggc

SEQ ID NO: 370 - RNA, 20 nt, Artificial Sequence
  synthesized
cugugaccguggcccacccu

SEQ ID NO: 371 - RNA, 20 nt, Artificial Sequence
  synthesized
cugugaccguggcccauccu

SEQ ID NO: 372 - RNA, 20 nt, Artificial Sequence
  synthesized
gcagcuaccaacacuaggau

SEQ ID NO: 373 - RNA, 20 nt, Artificial Sequence
  synthesized
gcagcuaccaacacuagggu

SEQ ID NO: 374 - RNA, 20 nt, Artificial Sequence
  synthesized
ggcagcuaccaacacuagga

SEQ ID NO: 375 - RNA, 20 nt, Artificial Sequence
  synthesized
ggcagcuaccaacacuaggg

SEQ ID NO: 376 - RNA, 20 nt, Artificial Sequence
  synthesized
ugaccguggcccacccuagu

SEQ ID NO: 377 - RNA, 20 nt, Artificial Sequence
  synthesized
ugaccguggcccauccuagu

SEQ ID NO: 378 - RNA, 20 nt, Artificial Sequence
  synthesized
aggcgagggcuggaagcugg

SEQ ID NO: 379 - RNA, 20 nt, Artificial Sequence
  synthesized
aggugagggcuggaagcugg

SEQ ID NO: 380 - RNA, 20 nt, Artificial Sequence
  synthesized
cagcccucgccugcccaauc

SEQ ID NO: 381 - RNA, 20 nt, Artificial Sequence
  synthesized
cagcuuccagcccucaccug

SEQ ID NO: 382 - RNA, 20 nt, Artificial Sequence
  synthesized
cagcuuccagcccucgccug

SEQ ID NO: 383 - RNA, 20 nt, Artificial Sequence
  synthesized
caggcgagggcuggaagcug

SEQ ID NO: 384 - RNA, 20 nt, Artificial Sequence
  synthesized
caggugagggcuggaagcug

SEQ ID NO: 385 - RNA, 20 nt, Artificial Sequence
  synthesized
cgagggcuggaagcuggggg

SEQ ID NO: 386 - RNA, 20 nt, Artificial Sequence
  synthesized
gcaggcgagggcuggaagcu

SEQ ID NO: 387 - RNA, 20 nt, Artificial Sequence
  synthesized
gcaggugagggcuggaagcu

SEQ ID NO: 388 - RNA, 20 nt, Artificial Sequence
  synthesized
gcccucaccugcccaauccc

SEQ ID NO: 389 - RNA, 20 nt, Artificial Sequence
  synthesized
gcccucgccugcccaauccc

SEQ ID NO: 390 - RNA, 20 nt, Artificial Sequence
  synthesized
gcgagggcuggaagcugggg

SEQ ID NO: 391 - RNA, 20 nt, Artificial Sequence
  synthesized
gcuggggauugggcaggcga

SEQ ID NO: 392 - RNA, 20 nt, Artificial Sequence
  synthesized
gcuggggauugggcagguga

SEQ ID NO: 393 - RNA, 20 nt, Artificial Sequence
  synthesized
ggauugggcaggcgagggcu

SEQ ID NO: 394 - RNA, 20 nt, Artificial Sequence
  synthesized
ggcaggcgagggcuggaagc

SEQ ID NO: 395 - RNA, 20 nt, Artificial Sequence
  synthesized
ggcaggugagggcuggaagc

SEQ ID NO: 396 - RNA, 20 nt, Artificial Sequence
  synthesized
ggcgagggcuggaagcuggg

SEQ ID NO: 397 - RNA, 20 nt, Artificial Sequence
  synthesized
gggauugggcaggcgagggc

SEQ ID NO: 398 - RNA, 20 nt, Artificial Sequence
  synthesized
ggugagggcuggaagcuggg

SEQ ID NO: 399 - RNA, 20 nt, Artificial Sequence
  synthesized
gugagggcuggaagcugggg

SEQ ID NO: 400 - RNA, 20 nt, Artificial Sequence
  synthesized
ugagggcuggaagcuggggg

SEQ ID NO: 401 - RNA, 20 nt, Artificial Sequence
  synthesized
ugcuggggauugggcaggcg

SEQ ID NO: 402 - RNA, 20 nt, Artificial Sequence
  synthesized
ugcuggggauugggcaggug

SEQ ID NO: 403 - RNA, 20 nt, Artificial Sequence
  synthesized
aaagucugcacaaauaucuu

SEQ ID NO: 404 - RNA, 20 nt, Artificial Sequence
  synthesized
aaagucugcacaaaugucuu

SEQ ID NO: 405 - RNA, 20 nt, Artificial Sequence
  synthesized
aagucugcacaaauaucuug

SEQ ID NO: 406 - RNA, 20 nt, Artificial Sequence
  synthesized
aagucugcacaaaugucuug

SEQ ID NO: 407 - RNA, 20 nt, Artificial Sequence
  synthesized
aguccccaagacauuugugc

SEQ ID NO: 408 - RNA, 20 nt, Artificial Sequence
  synthesized
aguccccaagauauuugugc

SEQ ID NO: 409 - RNA, 20 nt, Artificial Sequence
  synthesized
agucugcacaaauaucuugg

SEQ ID NO: 410 - RNA, 20 nt, Artificial Sequence
  synthesized
agucugcacaaaugucuugg

SEQ ID NO: 411 - RNA, 20 nt, Artificial Sequence
  synthesized
aucccaguccccaagacauu

SEQ ID NO: 412 - RNA, 20 nt, Artificial Sequence
  synthesized
aucccaguccccaagauauu

SEQ ID NO: 413 - RNA, 20 nt, Artificial Sequence
  synthesized
caaagucugcacaaauaucu

SEQ ID NO: 414 - RNA, 20 nt, Artificial Sequence
  synthesized
caaagucugcacaaaugucu

SEQ ID NO: 415 - RNA, 20 nt, Artificial Sequence
  synthesized
cacaaauaucuuggggacug

SEQ ID NO: 416 - RNA, 20 nt, Artificial Sequence
  synthesized
cacaaaugucuuggggacug

SEQ ID NO: 417 - RNA, 20 nt, Artificial Sequence
  synthesized
gcacaaauaucuuggggacu

SEQ ID NO: 418 - RNA, 20 nt, Artificial Sequence
  synthesized
ugcacaaauaucuuggggac

SEQ ID NO: 419 - RNA, 20 nt, Artificial Sequence
  synthesized
ugcacaaaugucuuggggac

SEQ ID NO: 420 - RNA, 20 nt, Artificial Sequence
  synthesized
aagaccacggacagaagcuc

SEQ ID NO: 421 - RNA, 20 nt, Artificial Sequence
  synthesized
aagaccacggacagcagcuc

SEQ ID NO: 422 - RNA, 20 nt, Artificial Sequence
  synthesized
acagcagcucagauuugauu

SEQ ID NO: 423 - RNA, 20 nt, Artificial Sequence
  synthesized
aucaaaucugagcugcuguc

SEQ ID NO: 424 - RNA, 20 nt, Artificial Sequence
  synthesized
aucaaaucugagcuucuguc

SEQ ID NO: 425 - RNA, 20 nt, Artificial Sequence
  synthesized
caaaucugagcugcuguccg

SEQ ID NO: 426 - RNA, 20 nt, Artificial Sequence
  synthesized
caaaucugagcuucuguccg

SEQ ID NO: 427 - RNA, 20 nt, Artificial Sequence
  synthesized
cacggacagaagcucagauu

SEQ ID NO: 428 - RNA, 20 nt, Artificial Sequence
  synthesized
cacggacagcagcucagauu

SEQ ID NO: 429 - RNA, 20 nt, Artificial Sequence
  synthesized
cagcagcucagauuugauuc

SEQ ID NO: 430 - RNA, 20 nt, Artificial Sequence
  synthesized
cuucuguccguggucuucac

SEQ ID NO: 431 - RNA, 20 nt, Artificial Sequence
  synthesized
gaagcucagauuugauucgg

SEQ ID NO: 432 - RNA, 20 nt, Artificial Sequence
  synthesized
gaccacggacagaagcucag

SEQ ID NO: 433 - RNA, 20 nt, Artificial Sequence
  synthesized
gaccacggacagcagcucag

SEQ ID NO: 434 - RNA, 20 nt, Artificial Sequence
  synthesized
gagcugcuguccguggucuu

SEQ ID NO: 435 - RNA, 20 nt, Artificial Sequence
  synthesized
gagcuucuguccguggucuu

SEQ ID NO: 436 - RNA, 20 nt, Artificial Sequence
  synthesized
gcagcucagauuugauucgg

SEQ ID NO: 437 - RNA, 20 nt, Artificial Sequence
  synthesized
gcugcuguccguggucuuca

SEQ ID NO: 438 - RNA, 20 nt, Artificial Sequence
  synthesized
gcuucuguccguggucuuca

SEQ ID NO: 439 - RNA, 20 nt, Artificial Sequence
  synthesized
gugaagaccacggacagaag

SEQ ID NO: 440 - RNA, 20 nt, Artificial Sequence
  synthesized
gugaagaccacggacagcag

SEQ ID NO: 441 - RNA, 20 nt, Artificial Sequence
  synthesized
aggagguguggggcugccgg

SEQ ID NO: 442 - RNA, 20 nt, Artificial Sequence
  synthesized
cccgguacucuccccggcag

SEQ ID NO: 443 - RNA, 20 nt, Artificial Sequence
  synthesized
cggcagccccacaccuccua

SEQ ID NO: 444 - RNA, 20 nt, Artificial Sequence
  synthesized
cgguacucuccccggcagcc

SEQ ID NO: 445 - RNA, 20 nt, Artificial Sequence
  synthesized
cugccggggagaguaccggg

SEQ ID NO: 446 - RNA, 20 nt, Artificial Sequence
  synthesized
cugcgggggagaguaccggg

SEQ ID NO: 447 - RNA, 20 nt, Artificial Sequence
  synthesized
gagguguggggcugccgggg

SEQ ID NO: 448 - RNA, 20 nt, Artificial Sequence
  synthesized
gccggggagaguaccggguc

SEQ ID NO: 449 - RNA, 20 nt, Artificial Sequence
  synthesized
gcgggggagaguaccggguc

SEQ ID NO: 450 - RNA, 20 nt, Artificial Sequence
  synthesized
ggagguguggggcugccggg

SEQ ID NO: 451 - RNA, 20 nt, Artificial Sequence
  synthesized
gggcugccggggagaguacc

SEQ ID NO: 452 - RNA, 20 nt, Artificial Sequence
  synthesized
ggggcugccggggagaguac

SEQ ID NO: 453 - RNA, 20 nt, Artificial Sequence
  synthesized
guaggagguguggggcugcc

SEQ ID NO: 454 - RNA, 20 nt, Artificial Sequence
  synthesized
uaggagguguggggcugccg

SEQ ID NO: 455 - RNA, 20 nt, Artificial Sequence
  synthesized
uggggcugccggggagagua

SEQ ID NO: 456 - RNA, 20 nt, Artificial Sequence
  synthesized
acccacugaccacaagcagc

SEQ ID NO: 457 - RNA, 20 nt, Artificial Sequence
  synthesized
acccagugaccacaagcagc

SEQ ID NO: 458 - RNA, 20 nt, Artificial Sequence
  synthesized
acuggguccagucuaaaaug

SEQ ID NO: 459 - RNA, 20 nt, Artificial Sequence
  synthesized
cacuggguccagucuaaaau

SEQ ID NO: 460 - RNA, 20 nt, Artificial Sequence
  synthesized
caguggguccagucuaaaau

SEQ ID NO: 461 - RNA, 20 nt, Artificial Sequence
  synthesized
cauuuuagacuggacccacu

SEQ ID NO: 462 - RNA, 20 nt, Artificial Sequence
  synthesized
cauuuuagacuggacccagu

SEQ ID NO: 463 - RNA, 20 nt, Artificial Sequence
  synthesized
ccacugaccacaagcagccu

SEQ ID NO: 464 - RNA, 20 nt, Artificial Sequence
  synthesized
ccagugaccacaagcagccu

SEQ ID NO: 465 - RNA, 20 nt, Artificial Sequence
  synthesized
ccauuuuagacuggacccac

SEQ ID NO: 466 - RNA, 20 nt, Artificial Sequence
  synthesized
ccauuuuagacuggacccag

SEQ ID NO: 467 - RNA, 20 nt, Artificial Sequence
  synthesized
ccuaggcugcuuguggucac

SEQ ID NO: 468 - RNA, 20 nt, Artificial Sequence
  synthesized
ccuaggcugcuuguggucag

SEQ ID NO: 469 - RNA, 20 nt, Artificial Sequence
  synthesized
cuaggcugcuuguggucacu

SEQ ID NO: 470 - RNA, 20 nt, Artificial Sequence
  synthesized
cuaggcugcuuguggucagu

SEQ ID NO: 471 - RNA, 20 nt, Artificial Sequence
  synthesized
cuggguccagucuaaaaugg

SEQ ID NO: 472 - RNA, 20 nt, Artificial Sequence
  synthesized
gacuggacccacugaccaca

SEQ ID NO: 473 - RNA, 20 nt, Artificial Sequence
  synthesized
gacuggacccagugaccaca

SEQ ID NO: 474 - RNA, 20 nt, Artificial Sequence
  synthesized
ggcugcuuguggucaguggg

SEQ ID NO: 475 - RNA, 20 nt, Artificial Sequence
  synthesized
guggguccagucuaaaaugg

SEQ ID NO: 476 - RNA, 20 nt, Artificial Sequence
  synthesized
ucacuggguccagucuaaaa

SEQ ID NO: 477 - RNA, 20 nt, Artificial Sequence
  synthesized
ucaguggguccagucuaaaa

SEQ ID NO: 478 - RNA, 20 nt, Artificial Sequence
  synthesized
uuagacuggacccacugacc

SEQ ID NO: 479 - RNA, 20 nt, Artificial Sequence
  synthesized
uuagacuggacccagugacc

SEQ ID NO: 480 - RNA, 20 nt, Artificial Sequence
  synthesized
agagaggcccgaggggaggg

SEQ ID NO: 481 - RNA, 20 nt, Artificial Sequence
  synthesized
ccccucgggccucucccgag

SEQ ID NO: 482 - RNA, 20 nt, Artificial Sequence
  synthesized
ccccucgggccucucucgag

SEQ ID NO: 483 - RNA, 20 nt, Artificial Sequence
  synthesized
cccgagcagggcacaggagg

SEQ ID NO: 484 - RNA, 20 nt, Artificial Sequence
  synthesized
cccuccccucgggccucucc

SEQ ID NO: 485 - RNA, 20 nt, Artificial Sequence
  synthesized
ccuccugugcccugcucgag

SEQ ID NO: 486 - RNA, 20 nt, Artificial Sequence
  synthesized
ccuccugugcccugcucggg

SEQ ID NO: 487 - RNA, 20 nt, Artificial Sequence
  synthesized
ccucgggccucucccgagca

SEQ ID NO: 488 - RNA, 20 nt, Artificial Sequence
  synthesized
ccucgggccucucucgagca

SEQ ID NO: 489 - RNA, 20 nt, Artificial Sequence
  synthesized
ccucucccgagcagggcaca

SEQ ID NO: 490 - RNA, 20 nt, Artificial Sequence
  synthesized
ccucucucgagcagggcaca

SEQ ID NO: 491 - RNA, 20 nt, Artificial Sequence
  synthesized
ccugcucgagagaggcccga

SEQ ID NO: 492 - RNA, 20 nt, Artificial Sequence
  synthesized
ccugcucgggagaggcccga

SEQ ID NO: 493 - RNA, 20 nt, Artificial Sequence
  synthesized
cgagagaggcccgaggggag

SEQ ID NO: 494 - RNA, 20 nt, Artificial Sequence
  synthesized
cgggagaggcccgaggggag

SEQ ID NO: 495 - RNA, 20 nt, Artificial Sequence
  synthesized
cucccgagcagggcacagga

SEQ ID NO: 496 - RNA, 20 nt, Artificial Sequence
  synthesized
cucgagcagggcacaggagg

SEQ ID NO: 497 - RNA, 20 nt, Artificial Sequence
  synthesized
cucgggagaggcccgagggg

SEQ ID NO: 498 - RNA, 20 nt, Artificial Sequence
  synthesized
cucucgagcagggcacagga

SEQ ID NO: 499 - RNA, 20 nt, Artificial Sequence
  synthesized
cugcucgagagaggcccgag

SEQ ID NO: 500 - RNA, 20 nt, Artificial Sequence
  synthesized
cugcucgggagaggcccgag

SEQ ID NO: 501 - RNA, 20 nt, Artificial Sequence
  synthesized
gagagaggcccgaggggagg

SEQ ID NO: 502 - RNA, 20 nt, Artificial Sequence
  synthesized
gccucucccgagcagggcac

SEQ ID NO: 503 - RNA, 20 nt, Artificial Sequence
  synthesized
gccucucucgagcagggcac

SEQ ID NO: 504 - RNA, 20 nt, Artificial Sequence
  synthesized
gggagaggcccgaggggagg

SEQ ID NO: 505 - RNA, 20 nt, Artificial Sequence
  synthesized
uccugugcccugcucgagag

SEQ ID NO: 506 - RNA, 20 nt, Artificial Sequence
  synthesized
uccugugcccugcucgggag

SEQ ID NO: 507 - RNA, 20 nt, Artificial Sequence
  synthesized
ucgagagaggcccgagggga

SEQ ID NO: 508 - RNA, 20 nt, Artificial Sequence
  synthesized
ucgggagaggcccgagggga

SEQ ID NO: 509 - RNA, 20 nt, Artificial Sequence
  synthesized
ucucccgagcagggcacagg

SEQ ID NO: 510 - RNA, 20 nt, Artificial Sequence
  synthesized
ucucucgagcagggcacagg

SEQ ID NO: 511 - RNA, 20 nt, Artificial Sequence
  synthesized
ugcccugcucgagagaggcc

SEQ ID NO: 512 - RNA, 20 nt, Artificial Sequence
  synthesized
ugcccugcucgggagaggcc

SEQ ID NO: 513 - RNA, 20 nt, Artificial Sequence
  synthesized
ugcucgagagaggcccgagg

SEQ ID NO: 514 - RNA, 20 nt, Artificial Sequence
  synthesized
ugcucgggagaggcccgagg

SEQ ID NO: 515 - RNA, 20 nt, Artificial Sequence
  synthesized
acgaggcgcuccaggggacc

SEQ ID NO: 516 - RNA, 20 nt, Artificial Sequence
  synthesized
augaggcgcuccaggggacc

SEQ ID NO: 517 - RNA, 20 nt, Artificial Sequence
  synthesized
cccuggagcgccucauaccc

SEQ ID NO: 518 - RNA, 20 nt, Artificial Sequence
  synthesized
cccuggagcgccucguaccc

SEQ ID NO: 519 - RNA, 20 nt, Artificial Sequence
  synthesized
cggguacgaggcgcuccagg

SEQ ID NO: 520 - RNA, 20 nt, Artificial Sequence
  synthesized
cggguaugaggcgcuccagg

SEQ ID NO: 521 - RNA, 20 nt, Artificial Sequence
  synthesized
cugcggguacgaggcgcucc

SEQ ID NO: 522 - RNA, 20 nt, Artificial Sequence
  synthesized
cugcggguaugaggcgcucc

SEQ ID NO: 523 - RNA, 20 nt, Artificial Sequence
  synthesized
cuggagcgccucauacccgc

SEQ ID NO: 524 - RNA, 20 nt, Artificial Sequence
  synthesized
cuggagcgccucguacccgc

SEQ ID NO: 525 - RNA, 20 nt, Artificial Sequence
  synthesized
gccucauacccgcagaccgc

SEQ ID NO: 526 - RNA, 20 nt, Artificial Sequence
  synthesized
gccucguacccgcagaccgc

SEQ ID NO: 527 - RNA, 20 nt, Artificial Sequence
  synthesized
gcgccucauacccgcagacc

SEQ ID NO: 528 - RNA, 20 nt, Artificial Sequence
  synthesized
gcgccucguacccgcagacc

SEQ ID NO: 529 - RNA, 20 nt, Artificial Sequence
  synthesized
gcggguacgaggcgcuccag

SEQ ID NO: 530 - RNA, 20 nt, Artificial Sequence
  synthesized
gcggguaugaggcgcuccag

SEQ ID NO: 531 - RNA, 20 nt, Artificial Sequence
  synthesized
gguccccuggagcgccucau

SEQ ID NO: 532 - RNA, 20 nt, Artificial Sequence
  synthesized
guacgaggcgcuccagggga

SEQ ID NO: 533 - RNA, 20 nt, Artificial Sequence
  synthesized
guaugaggcgcuccagggga

SEQ ID NO: 534 - RNA, 20 nt, Artificial Sequence
  synthesized
gucugcggucugcggguacg

SEQ ID NO: 535 - RNA, 20 nt, Artificial Sequence
  synthesized
gucugcggucugcggguaug

SEQ ID NO: 536 - RNA, 20 nt, Artificial Sequence
  synthesized
ucugcggucugcggguacga

SEQ ID NO: 537 - RNA, 20 nt, Artificial Sequence
  synthesized
ucugcggucugcggguauga

SEQ ID NO: 538 - RNA, 20 nt, Artificial Sequence
  synthesized
ugcggguacgaggcgcucca

SEQ ID NO: 539 - RNA, 20 nt, Artificial Sequence
  synthesized
ugcggguaugaggcgcucca

SEQ ID NO: 540 - RNA, 20 nt, Artificial Sequence
  synthesized
uggagcgccucauacccgca

SEQ ID NO: 541 - RNA, 20 nt, Artificial Sequence
  synthesized
uggagcgccucguacccgca

SEQ ID NO: 542 - RNA, 20 nt, Artificial Sequence
  synthesized
uaauuugguuccuucugacu

SEQ ID NO: 543 - RNA, 20 nt, Artificial Sequence
  synthesized
cucaucagugagccgaauca

SEQ ID NO: 544 - RNA, 20 nt, Artificial Sequence
  synthesized
cucaucagugagccgacuca

SEQ ID NO: 545 - RNA, 20 nt, Artificial Sequence
  synthesized
gacucaaugaacaauuaaca

SEQ ID NO: 546 - RNA, 20 nt, Artificial Sequence
  synthesized
gagccgaaucaaugaacaau

SEQ ID NO: 547 - RNA, 20 nt, Artificial Sequence
  synthesized
gagccgacucaaugaacaau

SEQ ID NO: 548 - RNA, 20 nt, Artificial Sequence
  synthesized
gugagccgaaucaaugaaca

SEQ ID NO: 549 - RNA, 20 nt, Artificial Sequence
  synthesized
gugagccgacucaaugaaca

SEQ ID NO: 550 - RNA, 20 nt, Artificial Sequence
  synthesized
ucaucagugagccgaaucaa

SEQ ID NO: 551 - RNA, 20 nt, Artificial Sequence
  synthesized
ucaucagugagccgacucaa

SEQ ID NO: 552 - RNA, 20 nt, Artificial Sequence
  synthesized
ucauugagucggcucacuga

SEQ ID NO: 553 - RNA, 20 nt, Artificial Sequence
  synthesized
ucauugauucggcucacuga

SEQ ID NO: 554 - RNA, 20 nt, Artificial Sequence
  synthesized
uguucauugagucggcucac

SEQ ID NO: 555 - RNA, 20 nt, Artificial Sequence
  synthesized
uguucauugauucggcucac

SEQ ID NO: 556 - RNA, 20 nt, Artificial Sequence
  synthesized
uucauugagucggcucacug

SEQ ID NO: 557 - RNA, 20 nt, Artificial Sequence
  synthesized
uucauugauucggcucacug

SEQ ID NO: 558 - RNA, 20 nt, Artificial Sequence
  synthesized
acccagagcagguccuuuag

SEQ ID NO: 559 - RNA, 20 nt, Artificial Sequence
  synthesized
acccagcgcagguccuuuag

SEQ ID NO: 560 - RNA, 20 nt, Artificial Sequence
  synthesized
agcagguccuuuagugaccc

SEQ ID NO: 561 - RNA, 20 nt, Artificial Sequence
  synthesized
aggggacagugacccagagc

SEQ ID NO: 562 - RNA, 20 nt, Artificial Sequence
  synthesized
aggggacagugacccagcgc

SEQ ID NO: 563 - RNA, 20 nt, Artificial Sequence
  synthesized
cagagcagguccuuuaguga

SEQ ID NO: 564 - RNA, 20 nt, Artificial Sequence
  synthesized
cagcgcagguccuuuaguga

SEQ ID NO: 565 - RNA, 20 nt, Artificial Sequence
  synthesized
cgcagguccuuuagugaccc

SEQ ID NO: 566 - RNA, 20 nt, Artificial Sequence
  synthesized
gggucacuaaaggaccugcg

SEQ ID NO: 567 - RNA, 20 nt, Artificial Sequence
  synthesized
gggucacuaaaggaccugcu

SEQ ID NO: 568 - RNA, 20 nt, Artificial Sequence
  synthesized
ggucacuaaaggaccugcgc

SEQ ID NO: 569 - RNA, 20 nt, Artificial Sequence
  synthesized
ggucacuaaaggaccugcuc

SEQ ID NO: 570 - RNA, 20 nt, Artificial Sequence
  synthesized
guaggggacagugacccaga

SEQ ID NO: 571 - RNA, 20 nt, Artificial Sequence
  synthesized
guaggggacagugacccagc

SEQ ID NO: 572 - RNA, 20 nt, Artificial Sequence
  synthesized
gucacuaaaggaccugcgcu

SEQ ID NO: 573 - RNA, 20 nt, Artificial Sequence
  synthesized
gucacuaaaggaccugcucu

SEQ ID NO: 574 - RNA, 20 nt, Artificial Sequence
  synthesized
ugacccagagcagguccuuu

SEQ ID NO: 575 - RNA, 20 nt, Artificial Sequence
  synthesized
ugacccagcgcagguccuuu

SEQ ID NO: 576 - RNA, 20 nt, Artificial Sequence
  synthesized
ugcgcugggucacugucccc

SEQ ID NO: 577 - RNA, 20 nt, Artificial Sequence
  synthesized
ugcucugggucacugucccc

SEQ ID NO: 578 - RNA, 20 nt, Artificial Sequence
  synthesized
aauuagcggagucucuggaa

SEQ ID NO: 579 - RNA, 20 nt, Artificial Sequence
  synthesized
agagacuccgcuaauccacc

SEQ ID NO: 580 - RNA, 20 nt, Artificial Sequence
  synthesized
auuccacccucaacccccac

SEQ ID NO: 581 - RNA, 20 nt, Artificial Sequence
  synthesized
gauuagcggagucucuggaa

SEQ ID NO: 582 - RNA, 20 nt, Artificial Sequence
  synthesized
ggaauuagcggagucucugg

SEQ ID NO: 583 - RNA, 20 nt, Artificial Sequence
  synthesized
ggggguugaggguggauuag

SEQ ID NO: 584 - RNA, 20 nt, Artificial Sequence
  synthesized
gggguugaggguggauuagc

SEQ ID NO: 585 - RNA, 20 nt, Artificial Sequence
  synthesized
ggguggauuagcggagucuc

SEQ ID NO: 586 - RNA, 20 nt, Artificial Sequence
  synthesized
gguggauuagcggagucucu

SEQ ID NO: 587 - RNA, 20 nt, Artificial Sequence
  synthesized
guggggguugaggguggauu

SEQ ID NO: 588 - RNA, 20 nt, Artificial Sequence
  synthesized
ugagaguggggguugagggu

SEQ ID NO: 589 - RNA, 20 nt, Artificial Sequence
  synthesized
uggauuagcggagucucugg

SEQ ID NO: 590 - RNA, 20 nt, Artificial Sequence
  synthesized
aggcucccugcaugagccca

SEQ ID NO: 591 - RNA, 20 nt, Artificial Sequence
  synthesized
agggagcccgggccacaugg

SEQ ID NO: 592 - RNA, 20 nt, Artificial Sequence
  synthesized
auguggcccgggcucccugc

SEQ ID NO: 593 - RNA, 20 nt, Artificial Sequence
  synthesized
cagggagcccgggccacaug

SEQ ID NO: 594 - RNA, 20 nt, Artificial Sequence
  synthesized
cagggagccugggccacaug

SEQ ID NO: 595 - RNA, 20 nt, Artificial Sequence
  synthesized
cccgggccacaugggggacc

SEQ ID NO: 596 - RNA, 20 nt, Artificial Sequence
  synthesized
ccgggccacaugggggacca

SEQ ID NO: 597 - RNA, 20 nt, Artificial Sequence
  synthesized
ccugggccacaugggggacc

SEQ ID NO: 598 - RNA, 20 nt, Artificial Sequence
  synthesized
cgggccacaugggggaccag

SEQ ID NO: 599 - RNA, 20 nt, Artificial Sequence
  synthesized
cugggccacaugggggacca

SEQ ID NO: 600 - RNA, 20 nt, Artificial Sequence
  synthesized
gcagggagcccgggccacau

SEQ ID NO: 601 - RNA, 20 nt, Artificial Sequence
  synthesized
gcagggagccugggccacau

SEQ ID NO: 602 - RNA, 20 nt, Artificial Sequence
  synthesized
gggagcccgggccacauggg

SEQ ID NO: 603 - RNA, 20 nt, Artificial Sequence
  synthesized
gggagccugggccacauggg

SEQ ID NO: 604 - RNA, 20 nt, Artificial Sequence
  synthesized
gggcucaugcagggagcccg

SEQ ID NO: 605 - RNA, 20 nt, Artificial Sequence
  synthesized
gggcucccugcaugagccca

SEQ ID NO: 606 - RNA, 20 nt, Artificial Sequence
  synthesized
ugcagggagcccgggccaca

SEQ ID NO: 607 - RNA, 20 nt, Artificial Sequence
  synthesized
ugggccacaugggggaccag

SEQ ID NO: 608 - RNA, 20 nt, Artificial Sequence
  synthesized
ugggcucaugcagggagccc

SEQ ID NO: 609 - RNA, 20 nt, Artificial Sequence
  synthesized
ugggcucaugcagggagccu

SEQ ID NO: 610 - RNA, 20 nt, Artificial Sequence
  synthesized
uguggcccgggcucccugca

SEQ ID NO: 611 - RNA, 20 nt, Artificial Sequence
  synthesized
aacagcccuuccucggcuuc

SEQ ID NO: 612 - RNA, 20 nt, Artificial Sequence
  synthesized
aacagcccuuccucggcuuu

SEQ ID NO: 613 - RNA, 20 nt, Artificial Sequence
  synthesized
aaccagucggccuccaaagc

SEQ ID NO: 614 - RNA, 20 nt, Artificial Sequence
  synthesized
aaccagucggccuccgaagc

SEQ ID NO: 615 - RNA, 20 nt, Artificial Sequence
  synthesized
cagcccuuccucggcuucgg

SEQ ID NO: 616 - RNA, 20 nt, Artificial Sequence
  synthesized
cagcccuuccucggcuuugg

SEQ ID NO: 617 - RNA, 20 nt, Artificial Sequence
  synthesized
cagucggccuccaaagccga

SEQ ID NO: 618 - RNA, 20 nt, Artificial Sequence
  synthesized
cagucggccuccgaagccga

SEQ ID NO: 619 - RNA, 20 nt, Artificial Sequence
  synthesized
ccagucggccuccaaagccg

SEQ ID NO: 620 - RNA, 20 nt, Artificial Sequence
  synthesized
ccagucggccuccgaagccg

SEQ ID NO: 621 - RNA, 20 nt, Artificial Sequence
  synthesized
ccucggcuucggaggccgac

SEQ ID NO: 622 - RNA, 20 nt, Artificial Sequence
  synthesized
ccucggcuuuggaggccgac

SEQ ID NO: 623 - RNA, 20 nt, Artificial Sequence
  synthesized
ccuuccucggcuucggaggc

SEQ ID NO: 624 - RNA, 20 nt, Artificial Sequence
  synthesized
ccuuccucggcuuuggaggc

SEQ ID NO: 625 - RNA, 20 nt, Artificial Sequence
  synthesized
cggaggccgacugguugccu

SEQ ID NO: 626 - RNA, 20 nt, Artificial Sequence
  synthesized
cggccuccaaagccgaggaa

SEQ ID NO: 627 - RNA, 20 nt, Artificial Sequence
  synthesized
cggccuccgaagccgaggaa

SEQ ID NO: 628 - RNA, 20 nt, Artificial Sequence
  synthesized
ucggccuccaaagccgagga

SEQ ID NO: 629 - RNA, 20 nt, Artificial Sequence
  synthesized
ucggccuccgaagccgagga

SEQ ID NO: 630 - RNA, 20 nt, Artificial Sequence
  synthesized
uggaggccgacugguugccu

SEQ ID NO: 631 - RNA, 20 nt, Artificial Sequence
  synthesized
accccucacugggcugaguc

SEQ ID NO: 632 - RNA, 20 nt, Artificial Sequence
  synthesized
accccucccugggcugaguc

SEQ ID NO: 633 - RNA, 20 nt, Artificial Sequence
  synthesized
agcccagugagggguggccu

SEQ ID NO: 634 - RNA, 20 nt, Artificial Sequence
  synthesized
aucugacucagcccagggag

SEQ ID NO: 635 - RNA, 20 nt, Artificial Sequence
  synthesized
aucugacucagcccagugag

SEQ ID NO: 636 - RNA, 20 nt, Artificial Sequence
  synthesized
cagcccagugagggguggcc

SEQ ID NO: 637 - RNA, 20 nt, Artificial Sequence
  synthesized
caggccaccccucacugggc

SEQ ID NO: 638 - RNA, 20 nt, Artificial Sequence
  synthesized
caucugacucagcccaggga

SEQ ID NO: 639 - RNA, 20 nt, Artificial Sequence
  synthesized
caucugacucagcccaguga

SEQ ID NO: 640 - RNA, 20 nt, Artificial Sequence
  synthesized
ccaggccaccccucacuggg

SEQ ID NO: 641 - RNA, 20 nt, Artificial Sequence
  synthesized
ccaggccaccccucccuggg

SEQ ID NO: 642 - RNA, 20 nt, Artificial Sequence
  synthesized
ccagggagggguggccuggg

SEQ ID NO: 643 - RNA, 20 nt, Artificial Sequence
  synthesized
ccagugagggguggccuggg

SEQ ID NO: 644 - RNA, 20 nt, Artificial Sequence
  synthesized
ccaucugacucagcccaggg

SEQ ID NO: 645 - RNA, 20 nt, Artificial Sequence
  synthesized
ccaucugacucagcccagug

SEQ ID NO: 646 - RNA, 20 nt, Artificial Sequence
  synthesized
cccagggagggguggccugg

SEQ ID NO: 647 - RNA, 20 nt, Artificial Sequence
  synthesized
cccccaggccaccccucacu

SEQ ID NO: 648 - RNA, 20 nt, Artificial Sequence
  synthesized
cccccaggccaccccucccu

SEQ ID NO: 649 - RNA, 20 nt, Artificial Sequence
  synthesized
ccccucacugggcugaguca

SEQ ID NO: 650 - RNA, 20 nt, Artificial Sequence
  synthesized
ccccucccugggcugaguca

SEQ ID NO: 651 - RNA, 20 nt, Artificial Sequence
  synthesized
ccucacugggcugagucaga

SEQ ID NO: 652 - RNA, 20 nt, Artificial Sequence
  synthesized
ccucccugggcugagucaga

SEQ ID NO: 653 - RNA, 20 nt, Artificial Sequence
  synthesized
gcccagggagggguggccug

SEQ ID NO: 654 - RNA, 20 nt, Artificial Sequence
  synthesized
gcccagugagggguggccug

SEQ ID NO: 655 - RNA, 20 nt, Artificial Sequence
  synthesized
ucccccaggccaccccuccc

SEQ ID NO: 656 - RNA, 20 nt, Artificial Sequence
  synthesized
ucugacucagcccagugagg

SEQ ID NO: 657 - RNA, 20 nt, Artificial Sequence
  synthesized
aacccuuccccuauuaccgc

SEQ ID NO: 658 - RNA, 20 nt, Artificial Sequence
  synthesized
aucccuuccccuauuaccgc

SEQ ID NO: 659 - RNA, 20 nt, Artificial Sequence
  synthesized
cccacaaacccuuccccuau

SEQ ID NO: 660 - RNA, 20 nt, Artificial Sequence
  synthesized
aaugguucaccuggggacgg

SEQ ID NO: 661 - RNA, 20 nt, Artificial Sequence
  synthesized
augguucaccuggggacggu

SEQ ID NO: 662 - RNA, 20 nt, Artificial Sequence
  synthesized
gacucaccaccguccccagg

SEQ ID NO: 663 - RNA, 20 nt, Artificial Sequence
  synthesized
gguucaccuggggacggugg

SEQ ID NO: 664 - RNA, 20 nt, Artificial Sequence
  synthesized
ugacucaccaccguccccag

SEQ ID NO: 665 - RNA, 20 nt, Artificial Sequence
  synthesized
acugcagcugaggagaaggg

SEQ ID NO: 666 - RNA, 20 nt, Artificial Sequence
  synthesized
cgacuacagcugaggagaag

SEQ ID NO: 667 - RNA, 20 nt, Artificial Sequence
  synthesized
cgacugcagcugaggagaag

SEQ ID NO: 668 - RNA, 20 nt, Artificial Sequence
  synthesized
cuacagcugaggagaaggga

SEQ ID NO: 669 - RNA, 20 nt, Artificial Sequence
  synthesized
ucgacuacagcugaggagaa

SEQ ID NO: 670 - RNA, 20 nt, Artificial Sequence
  synthesized
ucgacugcagcugaggagaa

SEQ ID NO: 671 - RNA, 20 nt, Artificial Sequence
  synthesized
cccacaaucccuuccccuau

SEQ ID NO: 672 - RNA, 20 nt, Artificial Sequence
  synthesized
gcgguaauaggggaagggau

SEQ ID NO: 673 - RNA, 20 nt, Artificial Sequence
  synthesized
gcgguaauaggggaaggguu

SEQ ID NO: 674 - RNA, 20 nt, Artificial Sequence
  synthesized
gguaauaggggaagggauug

SEQ ID NO: 675 - RNA, 20 nt, Artificial Sequence
  synthesized
gguaauaggggaaggguuug

SEQ ID NO: 676 - RNA, 20 nt, Artificial Sequence
  synthesized
guaauaggggaagggauugu

SEQ ID NO: 677 - RNA, 20 nt, Artificial Sequence
  synthesized
guaauaggggaaggguuugu

SEQ ID NO: 678 - RNA, 20 nt, Artificial Sequence
  synthesized
guuuguggggccugccccuc

SEQ ID NO: 679 - RNA, 20 nt, Artificial Sequence
  synthesized
uaauaggggaagggauugug

SEQ ID NO: 680 - RNA, 20 nt, Artificial Sequence
  synthesized
uaauaggggaaggguuugug

SEQ ID NO: 681 - RNA, 20 nt, Artificial Sequence
  synthesized
cugcuucggauucauggccc

SEQ ID NO: 682 - RNA, 20 nt, Artificial Sequence
  synthesized
cugcuucugauucauggccc

SEQ ID NO: 683 - RNA, 20 nt, Artificial Sequence
  synthesized
gagggguacugcuucggauu

SEQ ID NO: 684 - RNA, 20 nt, Artificial Sequence
  synthesized
gagggguacugcuucugauu

SEQ ID NO: 685 - RNA, 20 nt, Artificial Sequence
  synthesized
gcacugggccaugaaucaga

SEQ ID NO: 686 - RNA, 20 nt, Artificial Sequence
  synthesized
gcacugggccaugaauccga

SEQ ID NO: 687 - RNA, 20 nt, Artificial Sequence
  synthesized
ggauucauggcccagugcuu

SEQ ID NO: 688 - RNA, 20 nt, Artificial Sequence
  synthesized
aaggcuccacugagaggaag

SEQ ID NO: 689 - RNA, 20 nt, Artificial Sequence
  synthesized
aaggcucuacugagaggaag

SEQ ID NO: 690 - RNA, 20 nt, Artificial Sequence
  synthesized
agagccuuggggccgagccc

SEQ ID NO: 691 - RNA, 20 nt, Artificial Sequence
  synthesized
aguagagccuuggggccgag

SEQ ID NO: 692 - RNA, 20 nt, Artificial Sequence
  synthesized
aguggagccuuggggccgag

SEQ ID NO: 693 - RNA, 20 nt, Artificial Sequence
  synthesized
caguagagccuuggggccga

SEQ ID NO: 694 - RNA, 20 nt, Artificial Sequence
  synthesized
caguggagccuuggggccga

SEQ ID NO: 695 - RNA, 20 nt, Artificial Sequence
  synthesized
ccacugagaggaaggacacg

SEQ ID NO: 696 - RNA, 20 nt, Artificial Sequence
  synthesized
ccccaaggcuccacugagag

SEQ ID NO: 697 - RNA, 20 nt, Artificial Sequence
  synthesized
ccccaaggcucuacugagag

SEQ ID NO: 698 - RNA, 20 nt, Artificial Sequence
  synthesized
ccucucaguagagccuuggg

SEQ ID NO: 699 - RNA, 20 nt, Artificial Sequence
  synthesized
ccucucaguggagccuuggg

SEQ ID NO: 700 - RNA, 20 nt, Artificial Sequence
  synthesized
cggccccaaggcuccacuga

SEQ ID NO: 701 - RNA, 20 nt, Artificial Sequence
  synthesized
cggccccaaggcucuacuga

SEQ ID NO: 702 - RNA, 20 nt, Artificial Sequence
  synthesized
cguguccuuccucucaguag

SEQ ID NO: 703 - RNA, 20 nt, Artificial Sequence
  synthesized
cguguccuuccucucagugg

SEQ ID NO: 704 - RNA, 20 nt, Artificial Sequence
  synthesized
cuacugagaggaaggacacg

SEQ ID NO: 705 - RNA, 20 nt, Artificial Sequence
  synthesized
cucaguagagccuuggggcc

SEQ ID NO: 706 - RNA, 20 nt, Artificial Sequence
  synthesized
cucaguggagccuuggggcc

SEQ ID NO: 707 - RNA, 20 nt, Artificial Sequence
  synthesized
cuccacugagaggaaggaca

SEQ ID NO: 708 - RNA, 20 nt, Artificial Sequence
  synthesized
cucggccccaaggcuccacu

SEQ ID NO: 709 - RNA, 20 nt, Artificial Sequence
  synthesized
cucggccccaaggcucuacu

SEQ ID NO: 710 - RNA, 20 nt, Artificial Sequence
  synthesized
gcguguccuuccucucagua

SEQ ID NO: 711 - RNA, 20 nt, Artificial Sequence
  synthesized
gcguguccuuccucucagug

SEQ ID NO: 712 - RNA, 20 nt, Artificial Sequence
  synthesized
gcuccacugagaggaaggac

SEQ ID NO: 713 - RNA, 20 nt, Artificial Sequence
  synthesized
gcucuacugagaggaaggac

SEQ ID NO: 714 - RNA, 20 nt, Artificial Sequence
  synthesized
ggagccuuggggccgagccc

SEQ ID NO: 715 - RNA, 20 nt, Artificial Sequence
  synthesized
ggcuccacugagaggaagga

SEQ ID NO: 716 - RNA, 20 nt, Artificial Sequence
  synthesized
ggcucggccccaaggcucca

SEQ ID NO: 717 - RNA, 20 nt, Artificial Sequence
  synthesized
ggcucggccccaaggcucua

SEQ ID NO: 718 - RNA, 20 nt, Artificial Sequence
  synthesized
ggcucuacugagaggaagga

SEQ ID NO: 719 - RNA, 20 nt, Artificial Sequence
  synthesized
gggcucggccccaaggcucc

SEQ ID NO: 720 - RNA, 20 nt, Artificial Sequence
  synthesized
gggcucggccccaaggcucu

SEQ ID NO: 721 - RNA, 20 nt, Artificial Sequence
  synthesized
guagagccuuggggccgagc

SEQ ID NO: 722 - RNA, 20 nt, Artificial Sequence
  synthesized
guggagccuuggggccgagc

SEQ ID NO: 723 - RNA, 20 nt, Artificial Sequence
  synthesized
guguccuuccucucaguaga

SEQ ID NO: 724 - RNA, 20 nt, Artificial Sequence
  synthesized
guguccuuccucucagugga

SEQ ID NO: 725 - RNA, 20 nt, Artificial Sequence
  synthesized
uagagccuuggggccgagcc

SEQ ID NO: 726 - RNA, 20 nt, Artificial Sequence
  synthesized
ucaguagagccuuggggccg

SEQ ID NO: 727 - RNA, 20 nt, Artificial Sequence
  synthesized
ucaguggagccuuggggccg

SEQ ID NO: 728 - RNA, 20 nt, Artificial Sequence
  synthesized
uccacugagaggaaggacac

SEQ ID NO: 729 - RNA, 20 nt, Artificial Sequence
  synthesized
uccucucaguagagccuugg

SEQ ID NO: 730 - RNA, 20 nt, Artificial Sequence
  synthesized
uccucucaguggagccuugg

SEQ ID NO: 731 - RNA, 20 nt, Artificial Sequence
  synthesized
uccuuccucucaguagagcc

SEQ ID NO: 732 - RNA, 20 nt, Artificial Sequence
  synthesized
uccuuccucucaguggagcc

SEQ ID NO: 733 - RNA, 20 nt, Artificial Sequence
  synthesized
ucuacugagaggaaggacac

SEQ ID NO: 734 - RNA, 20 nt, Artificial Sequence
  synthesized
uggagccuuggggccgagcc

SEQ ID NO: 735 - RNA, 20 nt, Artificial Sequence
  synthesized
uguccuuccucucaguagag

SEQ ID NO: 736 - RNA, 20 nt, Artificial Sequence
  synthesized
uguccuuccucucaguggag

SEQ ID NO: 737 - RNA, 20 nt, Artificial Sequence
  synthesized
aagccaggacccucaguggg

SEQ ID NO: 738 - RNA, 20 nt, Artificial Sequence
  synthesized
acccucagugggaugaggag

SEQ ID NO: 739 - RNA, 20 nt, Artificial Sequence
  synthesized
aggacccucagugggaugag

SEQ ID NO: 740 - RNA, 20 nt, Artificial Sequence
  synthesized
aggauccucagugggaugag

SEQ ID NO: 741 - RNA, 20 nt, Artificial Sequence
  synthesized
aggauccuggcuucucugca

SEQ ID NO: 742 - RNA, 20 nt, Artificial Sequence
  synthesized
aggguccuggcuucucugca

SEQ ID NO: 743 - RNA, 20 nt, Artificial Sequence
  synthesized
aucccacugaggauccuggc

SEQ ID NO: 744 - RNA, 20 nt, Artificial Sequence
  synthesized
aucccacugaggguccuggc

SEQ ID NO: 745 - RNA, 20 nt, Artificial Sequence
  synthesized
auccucagugggaugaggag

SEQ ID NO: 746 - RNA, 20 nt, Artificial Sequence
  synthesized
auccuggcuucucugcagca

SEQ ID NO: 747 - RNA, 20 nt, Artificial Sequence
  synthesized
cacugaggauccuggcuucu

SEQ ID NO: 748 - RNA, 20 nt, Artificial Sequence
  synthesized
cacugaggguccuggcuucu

SEQ ID NO: 749 - RNA, 20 nt, Artificial Sequence
  synthesized
cagagaagccaggacccuca

SEQ ID NO: 750 - RNA, 20 nt, Artificial Sequence
  synthesized
cagagaagccaggauccuca

SEQ ID NO: 751 - RNA, 20 nt, Artificial Sequence
  synthesized
caucccacugaggauccugg

SEQ ID NO: 752 - RNA, 20 nt, Artificial Sequence
  synthesized
caucccacugaggguccugg

SEQ ID NO: 753 - RNA, 20 nt, Artificial Sequence
  synthesized
ccacugaggauccuggcuuc

SEQ ID NO: 754 - RNA, 20 nt, Artificial Sequence
  synthesized
ccacugaggguccuggcuuc

SEQ ID NO: 755 - RNA, 20 nt, Artificial Sequence
  synthesized
cccacugaggauccuggcuu

SEQ ID NO: 756 - RNA, 20 nt, Artificial Sequence
  synthesized
cccacugaggguccuggcuu

SEQ ID NO: 757 - RNA, 20 nt, Artificial Sequence
  synthesized
cccucagugggaugaggagc

SEQ ID NO: 758 - RNA, 20 nt, Artificial Sequence
  synthesized
cucaucccacugaggauccu

SEQ ID NO: 759 - RNA, 20 nt, Artificial Sequence
  synthesized
cucaucccacugaggguccu

SEQ ID NO: 760 - RNA, 20 nt, Artificial Sequence
  synthesized
cuccucaucccacugaggau

SEQ ID NO: 761 - RNA, 20 nt, Artificial Sequence
  synthesized
cuccucaucccacugagggu

SEQ ID NO: 762 - RNA, 20 nt, Artificial Sequence
  synthesized
cugaggauccuggcuucucu

SEQ ID NO: 763 - RNA, 20 nt, Artificial Sequence
  synthesized
cugaggguccuggcuucucu

SEQ ID NO: 764 - RNA, 20 nt, Artificial Sequence
  synthesized
cugcagagaagccaggaccc

SEQ ID NO: 765 - RNA, 20 nt, Artificial Sequence
  synthesized
cugcagagaagccaggaucc

SEQ ID NO: 766 - RNA, 20 nt, Artificial Sequence
  synthesized
gaagccaggacccucagugg

SEQ ID NO: 767 - RNA, 20 nt, Artificial Sequence
  synthesized
gaagccaggauccucagugg

SEQ ID NO: 768 - RNA, 20 nt, Artificial Sequence
  synthesized
gacccucagugggaugagga

SEQ ID NO: 769 - RNA, 20 nt, Artificial Sequence
  synthesized
gaggauccuggcuucucugc

SEQ ID NO: 770 - RNA, 20 nt, Artificial Sequence
  synthesized
gaggguccuggcuucucugc

SEQ ID NO: 771 - RNA, 20 nt, Artificial Sequence
  synthesized
gauccucagugggaugagga

SEQ ID NO: 772 - RNA, 20 nt, Artificial Sequence
  synthesized
gauccuggcuucucugcagc

SEQ ID NO: 773 - RNA, 20 nt, Artificial Sequence
  synthesized
gccaggacccucagugggau

SEQ ID NO: 774 - RNA, 20 nt, Artificial Sequence
  synthesized
gccaggauccucagugggau

SEQ ID NO: 775 - RNA, 20 nt, Artificial Sequence
  synthesized
gcuccucaucccacugagga

SEQ ID NO: 776 - RNA, 20 nt, Artificial Sequence
  synthesized
gcuccucaucccacugaggg

SEQ ID NO: 777 - RNA, 20 nt, Artificial Sequence
  synthesized
gcugcagagaagccaggacc

SEQ ID NO: 778 - RNA, 20 nt, Artificial Sequence
  synthesized
gcugcagagaagccaggauc

SEQ ID NO: 779 - RNA, 20 nt, Artificial Sequence
  synthesized
ggacccucagugggaugagg

SEQ ID NO: 780 - RNA, 20 nt, Artificial Sequence
  synthesized
ggauccucagugggaugagg

SEQ ID NO: 781 - RNA, 20 nt, Artificial Sequence
  synthesized
ggauccuggcuucucugcag

SEQ ID NO: 782 - RNA, 20 nt, Artificial Sequence
  synthesized
ggguccuggcuucucugcag

SEQ ID NO: 783 - RNA, 20 nt, Artificial Sequence
  synthesized
gguccuggcuucucugcagc

SEQ ID NO: 784 - RNA, 20 nt, Artificial Sequence
  synthesized
guccuggcuucucugcagca

SEQ ID NO: 785 - RNA, 20 nt, Artificial Sequence
  synthesized
ucaucccacugaggguccug

SEQ ID NO: 786 - RNA, 20 nt, Artificial Sequence
  synthesized
ucccacugaggauccuggcu

SEQ ID NO: 787 - RNA, 20 nt, Artificial Sequence
  synthesized
ucccacugaggguccuggcu

SEQ ID NO: 788 - RNA, 20 nt, Artificial Sequence
  synthesized
uccucagugggaugaggagc

SEQ ID NO: 789 - RNA, 20 nt, Artificial Sequence
  synthesized
uccucaucccacugaggauc

SEQ ID NO: 790 - RNA, 20 nt, Artificial Sequence
  synthesized
uccucaucccacugaggguc

SEQ ID NO: 791 - RNA, 20 nt, Artificial Sequence
  synthesized
ugcagagaagccaggacccu

SEQ ID NO: 792 - RNA, 20 nt, Artificial Sequence
  synthesized
ugcagagaagccaggauccu

SEQ ID NO: 793 - RNA, 20 nt, Artificial Sequence
  synthesized
ugcugcagagaagccaggac

SEQ ID NO: 794 - RNA, 20 nt, Artificial Sequence
  synthesized
ugcugcagagaagccaggau

SEQ ID NO: 795 - RNA, 20 nt, Artificial Sequence
  synthesized
aacuguaggacuucugagag

SEQ ID NO: 796 - RNA, 20 nt, Artificial Sequence
  synthesized
aaggcucucagaaguccuac

SEQ ID NO: 797 - RNA, 20 nt, Artificial Sequence
  synthesized
agaaguccuacaguuaaauu

SEQ ID NO: 798 - RNA, 20 nt, Artificial Sequence
  synthesized
aggcucucagaaguccuaca

SEQ ID NO: 799 - RNA, 20 nt, Artificial Sequence
  synthesized
cagaaguccuacaguuaaau

SEQ ID NO: 800 - RNA, 20 nt, Artificial Sequence
  synthesized
cucucagaaguccuacaguu

SEQ ID NO: 801 - RNA, 20 nt, Artificial Sequence
  synthesized
gaaguccuacaguuaaauuu

SEQ ID NO: 802 - RNA, 20 nt, Artificial Sequence
  synthesized
ggcucucagaaguccuacag

SEQ ID NO: 803 - RNA, 20 nt, Artificial Sequence
  synthesized
uaacuguaggacuucugaga

SEQ ID NO: 804 - RNA, 20 nt, Artificial Sequence
  synthesized
ucagaaguccuacaguuaaa

SEQ ID NO: 805 - RNA, 20 nt, Artificial Sequence
  synthesized
uuaacuguaggacuucugag

SEQ ID NO: 806 - RNA, 20 nt, Artificial Sequence
  synthesized
aaaggcucucagaaguccgg

SEQ ID NO: 807 - RNA, 20 nt, Artificial Sequence
  synthesized
aaauaaauuuaacugccgga

SEQ ID NO: 808 - RNA, 20 nt, Artificial Sequence
  synthesized
aacugccggacuucugagag

SEQ ID NO: 809 - RNA, 20 nt, Artificial Sequence
  synthesized
aaggcucucagaaguccggc

SEQ ID NO: 810 - RNA, 20 nt, Artificial Sequence
  synthesized
aauaaauuuaacugccggac

SEQ ID NO: 811 - RNA, 20 nt, Artificial Sequence
  synthesized
acugccggacuucugagagc

SEQ ID NO: 812 - RNA, 20 nt, Artificial Sequence
  synthesized
agaaguccggcaguuaaauu

SEQ ID NO: 813 - RNA, 20 nt, Artificial Sequence
  synthesized
aggcucucagaaguccggca

SEQ ID NO: 814 - RNA, 20 nt, Artificial Sequence
  synthesized
aguccggcaguuaaauuuau

SEQ ID NO: 815 - RNA, 20 nt, Artificial Sequence
  synthesized
auaaauuuaacugccggacu

SEQ ID NO: 816 - RNA, 20 nt, Artificial Sequence
  synthesized
caaauaaauuuaacugccgg

SEQ ID NO: 817 - RNA, 20 nt, Artificial Sequence
  synthesized
cagaaguccggcaguuaaau

SEQ ID NO: 818 - RNA, 20 nt, Artificial Sequence
  synthesized
ccggacuucugagagccuuu

SEQ ID NO: 819 - RNA, 20 nt, Artificial Sequence
  synthesized
ccggcaguuaaauuuauuug

SEQ ID NO: 820 - RNA, 20 nt, Artificial Sequence
  synthesized
cggacuucugagagccuuua

SEQ ID NO: 821 - RNA, 20 nt, Artificial Sequence
  synthesized
cggcaguuaaauuuauuuga

SEQ ID NO: 822 - RNA, 20 nt, Artificial Sequence
  synthesized
cucagaaguccggcaguuaa

SEQ ID NO: 823 - RNA, 20 nt, Artificial Sequence
  synthesized
cucucagaaguccggcaguu

SEQ ID NO: 824 - RNA, 20 nt, Artificial Sequence
  synthesized
gaaguccggcaguuaaauuu

SEQ ID NO: 825 - RNA, 20 nt, Artificial Sequence
  synthesized
gccggacuucugagagccuu

SEQ ID NO: 826 - RNA, 20 nt, Artificial Sequence
  synthesized
gcucucagaaguccggcagu

SEQ ID NO: 827 - RNA, 20 nt, Artificial Sequence
  synthesized
ggcaguuaaauuuauuugac

SEQ ID NO: 828 - RNA, 20 nt, Artificial Sequence
  synthesized
ggcucucagaaguccggcag

SEQ ID NO: 829 - RNA, 20 nt, Artificial Sequence
  synthesized
uaaauuuaacugccggacuu

SEQ ID NO: 830 - RNA, 20 nt, Artificial Sequence
  synthesized
uaacugccggacuucugaga

SEQ ID NO: 831 - RNA, 20 nt, Artificial Sequence
  synthesized
ucaaauaaauuuaacugccg

SEQ ID NO: 832 - RNA, 20 nt, Artificial Sequence
  synthesized
ucagaaguccggcaguuaaa

SEQ ID NO: 833 - RNA, 20 nt, Artificial Sequence
  synthesized
uccggcaguuaaauuuauuu

SEQ ID NO: 834 - RNA, 20 nt, Artificial Sequence
  synthesized
ucucagaaguccggcaguua

SEQ ID NO: 835 - RNA, 20 nt, Artificial Sequence
  synthesized
ugccggacuucugagagccu

SEQ ID NO: 836 - RNA, 20 nt, Artificial Sequence
  synthesized
uuaacugccggacuucugag

SEQ ID NO: 837 - RNA, 20 nt, Artificial Sequence
  synthesized
uuuaacugccggacuucuga

SEQ ID NO: 838 - RNA, 20 nt, Artificial Sequence
  synthesized
aaauuaggaagaucacuggc

SEQ ID NO: 839 - RNA, 20 nt, Artificial Sequence
  synthesized
aaauuaggaaggucacuggc

SEQ ID NO: 840 - RNA, 20 nt, Artificial Sequence
  synthesized
aagagaaauuaggaagauca

SEQ ID NO: 841 - RNA, 20 nt, Artificial Sequence
  synthesized
aagagaaauuaggaagguca

SEQ ID NO: 842 - RNA, 20 nt, Artificial Sequence
  synthesized
aagaucacuggcacccucuc

SEQ ID NO: 843 - RNA, 20 nt, Artificial Sequence
  synthesized
aaggucacuggcacccucuc

SEQ ID NO: 844 - RNA, 20 nt, Artificial Sequence
  synthesized
aauuaggaagaucacuggca

SEQ ID NO: 845 - RNA, 20 nt, Artificial Sequence
  synthesized
aauuaggaaggucacuggca

SEQ ID NO: 846 - RNA, 20 nt, Artificial Sequence
  synthesized
accuuccuaauuucucuucc

SEQ ID NO: 847 - RNA, 20 nt, Artificial Sequence
  synthesized
agaaauuaggaagaucacug

SEQ ID NO: 848 - RNA, 20 nt, Artificial Sequence
  synthesized
agaaauuaggaaggucacug

SEQ ID NO: 849 - RNA, 20 nt, Artificial Sequence
  synthesized
agagggugccagugaccuuc

SEQ ID NO: 850 - RNA, 20 nt, Artificial Sequence
  synthesized
agagggugccagugaucuuc

SEQ ID NO: 851 - RNA, 20 nt, Artificial Sequence
  synthesized
agaucacuggcacccucuca

SEQ ID NO: 852 - RNA, 20 nt, Artificial Sequence
  synthesized
aggaagagaaauuaggaaga

SEQ ID NO: 853 - RNA, 20 nt, Artificial Sequence
  synthesized
aggaagagaaauuaggaagg

SEQ ID NO: 854 - RNA, 20 nt, Artificial Sequence
  synthesized
agggugccagugaccuuccu

SEQ ID NO: 855 - RNA, 20 nt, Artificial Sequence
  synthesized
agggugccagugaucuuccu

SEQ ID NO: 856 - RNA, 20 nt, Artificial Sequence
  synthesized
aggucacuggcacccucuca

SEQ ID NO: 857 - RNA, 20 nt, Artificial Sequence
  synthesized
agugaccuuccuaauuucuc

SEQ ID NO: 858 - RNA, 20 nt, Artificial Sequence
  synthesized
agugaucuuccuaauuucuc

SEQ ID NO: 859 - RNA, 20 nt, Artificial Sequence
  synthesized
aucacuggcacccucucaac

SEQ ID NO: 860 - RNA, 20 nt, Artificial Sequence
  synthesized
aucuuccuaauuucucuucc

SEQ ID NO: 861 - RNA, 20 nt, Artificial Sequence
  synthesized
auuaggaagaucacuggcac

SEQ ID NO: 862 - RNA, 20 nt, Artificial Sequence
  synthesized
auuaggaaggucacuggcac

SEQ ID NO: 863 - RNA, 20 nt, Artificial Sequence
  synthesized
cagugaccuuccuaauuucu

SEQ ID NO: 864 - RNA, 20 nt, Artificial Sequence
  synthesized
cagugaucuuccuaauuucu

SEQ ID NO: 865 - RNA, 20 nt, Artificial Sequence
  synthesized
ccagugaccuuccuaauuuc

SEQ ID NO: 866 - RNA, 20 nt, Artificial Sequence
  synthesized
ccagugaucuuccuaauuuc

SEQ ID NO: 867 - RNA, 20 nt, Artificial Sequence
  synthesized
ccuuccuaauuucucuuccu

SEQ ID NO: 868 - RNA, 20 nt, Artificial Sequence
  synthesized
gaaauuaggaagaucacugg

SEQ ID NO: 869 - RNA, 20 nt, Artificial Sequence
  synthesized
gaaauuaggaaggucacugg

SEQ ID NO: 870 - RNA, 20 nt, Artificial Sequence
  synthesized
agccccccuccgagcccagc

SEQ ID NO: 871 - RNA, 20 nt, Artificial Sequence
  synthesized
ccccccuccgagcccagcca

SEQ ID NO: 872 - RNA, 20 nt, Artificial Sequence
  synthesized
cccugggagccccccuccaa

SEQ ID NO: 873 - RNA, 20 nt, Artificial Sequence
  synthesized
cccugggagccccccuccga

SEQ ID NO: 874 - RNA, 20 nt, Artificial Sequence
  synthesized
cucggaggggggcucccagg

SEQ ID NO: 875 - RNA, 20 nt, Artificial Sequence
  synthesized
cuggcugggcucggaggggg

SEQ ID NO: 876 - RNA, 20 nt, Artificial Sequence
  synthesized
cuggcugggcuuggaggggg

SEQ ID NO: 877 - RNA, 20 nt, Artificial Sequence
  synthesized
cuuggaggggggcucccagg

SEQ ID NO: 878 - RNA, 20 nt, Artificial Sequence
  synthesized
gagccccccuccaagcccag

SEQ ID NO: 879 - RNA, 20 nt, Artificial Sequence
  synthesized
gagccccccuccgagcccag

SEQ ID NO: 880 - RNA, 20 nt, Artificial Sequence
  synthesized
gcccugggagccccccucca

SEQ ID NO: 881 - RNA, 20 nt, Artificial Sequence
  synthesized
gcuggcugggcucggagggg

SEQ ID NO: 882 - RNA, 20 nt, Artificial Sequence
  synthesized
gcugggcucggaggggggcu

SEQ ID NO: 883 - RNA, 20 nt, Artificial Sequence
  synthesized
gcugggcuuggaggggggcu

SEQ ID NO: 884 - RNA, 20 nt, Artificial Sequence
  synthesized
ggcugggcuuggaggggggc

SEQ ID NO: 885 - RNA, 20 nt, Artificial Sequence
  synthesized
gggagccccccuccaagccc

SEQ ID NO: 886 - RNA, 20 nt, Artificial Sequence
  synthesized
ucggaggggggcucccaggg

SEQ ID NO: 887 - RNA, 20 nt, Artificial Sequence
  synthesized
uggcugggcucggagggggg

SEQ ID NO: 888 - RNA, 20 nt, Artificial Sequence
  synthesized
uggcugggcuuggagggggg

SEQ ID NO: 889 - RNA, 20 nt, Artificial Sequence
  synthesized
ugggagccccccuccaagcc

SEQ ID NO: 890 - RNA, 20 nt, Artificial Sequence
  synthesized
ugggagccccccuccgagcc

SEQ ID NO: 891 - RNA, 20 nt, Artificial Sequence
  synthesized
uuggaggggggcucccaggg

SEQ ID NO: 892 - RNA, 20 nt, Artificial Sequence
  synthesized
gaagaucacuggcacccucu

SEQ ID NO: 893 - RNA, 20 nt, Artificial Sequence
  synthesized
gaaggucacuggcacccucu

SEQ ID NO: 894 - RNA, 20 nt, Artificial Sequence
  synthesized
gaccuuccuaauuucucuuc

SEQ ID NO: 895 - RNA, 20 nt, Artificial Sequence
  synthesized
gagaaauuaggaagaucacu

SEQ ID NO: 896 - RNA, 20 nt, Artificial Sequence
  synthesized
gagaaauuaggaaggucacu

SEQ ID NO: 897 - RNA, 20 nt, Artificial Sequence
  synthesized
gagagggugccagugaccuu

SEQ ID NO: 898 - RNA, 20 nt, Artificial Sequence
  synthesized
gagagggugccagugaucuu

SEQ ID NO: 899 - RNA, 20 nt, Artificial Sequence
  synthesized
gagggugccagugaccuucc

SEQ ID NO: 900 - RNA, 20 nt, Artificial Sequence
  synthesized
gagggugccagugaucuucc

SEQ ID NO: 901 - RNA, 20 nt, Artificial Sequence
  synthesized
gaucacuggcacccucucaa

SEQ ID NO: 902 - RNA, 20 nt, Artificial Sequence
  synthesized
gccagugaccuuccuaauuu

SEQ ID NO: 903 - RNA, 20 nt, Artificial Sequence
  synthesized
gccagugaucuuccuaauuu

SEQ ID NO: 904 - RNA, 20 nt, Artificial Sequence
  synthesized
ggaagagaaauuaggaagau

SEQ ID NO: 905 - RNA, 20 nt, Artificial Sequence
  synthesized
ggaagagaaauuaggaaggu

SEQ ID NO: 906 - RNA, 20 nt, Artificial Sequence
  synthesized
ggaagaucacuggcacccuc

SEQ ID NO: 907 - RNA, 20 nt, Artificial Sequence
  synthesized
ggaaggucacuggcacccuc

SEQ ID NO: 908 - RNA, 20 nt, Artificial Sequence
  synthesized
gggugccagugaccuuccua

SEQ ID NO: 909 - RNA, 20 nt, Artificial Sequence
  synthesized
gggugccagugaucuuccua

SEQ ID NO: 910 - RNA, 20 nt, Artificial Sequence
  synthesized
ggucacuggcacccucucaa

SEQ ID NO: 911 - RNA, 20 nt, Artificial Sequence
  synthesized
ggugccagugaccuuccuaa

SEQ ID NO: 912 - RNA, 20 nt, Artificial Sequence
  synthesized
ggugccagugaucuuccuaa

SEQ ID NO: 913 - RNA, 20 nt, Artificial Sequence
  synthesized
gucacuggcacccucucaac

SEQ ID NO: 914 - RNA, 20 nt, Artificial Sequence
  synthesized
gugaccuuccuaauuucucu

SEQ ID NO: 915 - RNA, 20 nt, Artificial Sequence
  synthesized
gugaucuuccuaauuucucu

SEQ ID NO: 916 - RNA, 20 nt, Artificial Sequence
  synthesized
gugccagugaccuuccuaau

SEQ ID NO: 917 - RNA, 20 nt, Artificial Sequence
  synthesized
gugccagugaucuuccuaau

SEQ ID NO: 918 - RNA, 20 nt, Artificial Sequence
  synthesized
guugagagggugccagugac

SEQ ID NO: 919 - RNA, 20 nt, Artificial Sequence
  synthesized
guugagagggugccagugau

SEQ ID NO: 920 - RNA, 20 nt, Artificial Sequence
  synthesized
uaggaagaucacuggcaccc

SEQ ID NO: 921 - RNA, 20 nt, Artificial Sequence
  synthesized
uaggaaggucacuggcaccc

SEQ ID NO: 922 - RNA, 20 nt, Artificial Sequence
  synthesized
ucuuccuaauuucucuuccu

SEQ ID NO: 923 - RNA, 20 nt, Artificial Sequence
  synthesized
ugaccuuccuaauuucucuu

SEQ ID NO: 924 - RNA, 20 nt, Artificial Sequence
  synthesized
ugagagggugccagugaccu

SEQ ID NO: 925 - RNA, 20 nt, Artificial Sequence
  synthesized
ugagagggugccagugaucu

SEQ ID NO: 926 - RNA, 20 nt, Artificial Sequence
  synthesized
ugccagugaccuuccuaauu

SEQ ID NO: 927 - RNA, 20 nt, Artificial Sequence
  synthesized
ugccagugaucuuccuaauu

SEQ ID NO: 928 - RNA, 20 nt, Artificial Sequence
  synthesized
uuaggaagaucacuggcacc

SEQ ID NO: 929 - RNA, 20 nt, Artificial Sequence
  synthesized
uuaggaaggucacuggcacc

SEQ ID NO: 930 - RNA, 20 nt, Artificial Sequence
  synthesized
uugagagggugccagugacc

SEQ ID NO: 931 - RNA, 20 nt, Artificial Sequence
  synthesized
uugagagggugccagugauc

SEQ ID NO: 932 - RNA, 20 nt, Artificial Sequence
  synthesized
aaccagacuccacagccucc

SEQ ID NO: 933 - RNA, 20 nt, Artificial Sequence
  synthesized
acccagacuccacagccucc

SEQ ID NO: 934 - RNA, 20 nt, Artificial Sequence
  synthesized
agaguggguccccccaacca

SEQ ID NO: 935 - RNA, 20 nt, Artificial Sequence
  synthesized
agaguggguccccccaccca

SEQ ID NO: 936 - RNA, 20 nt, Artificial Sequence
  synthesized
agucuggguggggggaccca

SEQ ID NO: 937 - RNA, 20 nt, Artificial Sequence
  synthesized
agucugguuggggggaccca

SEQ ID NO: 938 - RNA, 20 nt, Artificial Sequence
  synthesized
caagaguggguccccccaac

SEQ ID NO: 939 - RNA, 20 nt, Artificial Sequence
  synthesized
caagaguggguccccccacc

SEQ ID NO: 940 - RNA, 20 nt, Artificial Sequence
  synthesized
cacccagacuccacagccuc

SEQ ID NO: 941 - RNA, 20 nt, Artificial Sequence
  synthesized
ccaaccagacuccacagccu

SEQ ID NO: 942 - RNA, 20 nt, Artificial Sequence
  synthesized
ccaagaguggguccccccaa

SEQ ID NO: 943 - RNA, 20 nt, Artificial Sequence
  synthesized
ccaagaguggguccccccac

SEQ ID NO: 944 - RNA, 20 nt, Artificial Sequence
  synthesized
ccacccagacuccacagccu

SEQ ID NO: 945 - RNA, 20 nt, Artificial Sequence
  synthesized
cccaaccagacuccacagcc

SEQ ID NO: 946 - RNA, 20 nt, Artificial Sequence
  synthesized
cccacccagacuccacagcc

SEQ ID NO: 947 - RNA, 20 nt, Artificial Sequence
  synthesized
cccagacuccacagccuccu

SEQ ID NO: 948 - RNA, 20 nt, Artificial Sequence
  synthesized
ccccaaccagacuccacagc

SEQ ID NO: 949 - RNA, 20 nt, Artificial Sequence
  synthesized
cccccaaccagacuccacag

SEQ ID NO: 950 - RNA, 20 nt, Artificial Sequence
  synthesized
cccccacccagacuccacag

SEQ ID NO: 951 - RNA, 20 nt, Artificial Sequence
  synthesized
ccccccaaccagacuccaca

SEQ ID NO: 952 - RNA, 20 nt, Artificial Sequence
  synthesized
ccccccacccagacuccaca

SEQ ID NO: 953 - RNA, 20 nt, Artificial Sequence
  synthesized
cuggguggggggacccacuc

SEQ ID NO: 954 - RNA, 20 nt, Artificial Sequence
  synthesized
cugguuggggggacccacuc

SEQ ID NO: 955 - RNA, 20 nt, Artificial Sequence
  synthesized
cuguggagucuggguggggg

SEQ ID NO: 956 - RNA, 20 nt, Artificial Sequence
  synthesized
cuguggagucugguuggggg

SEQ ID NO: 957 - RNA, 20 nt, Artificial Sequence
  synthesized
ggagucuggguggggggacc

SEQ ID NO: 958 - RNA, 20 nt, Artificial Sequence
  synthesized
ggagucugguuggggggacc

SEQ ID NO: 959 - RNA, 20 nt, Artificial Sequence
  synthesized
ggguggggggacccacucuu

SEQ ID NO: 960 - RNA, 20 nt, Artificial Sequence
  synthesized
gguccccccaaccagacucc

SEQ ID NO: 961 - RNA, 20 nt, Artificial Sequence
  synthesized
gguccccccacccagacucc

SEQ ID NO: 962 - RNA, 20 nt, Artificial Sequence
  synthesized
gguggggggacccacucuug

SEQ ID NO: 963 - RNA, 20 nt, Artificial Sequence
  synthesized
gguuggggggacccacucuu

SEQ ID NO: 964 - RNA, 20 nt, Artificial Sequence
  synthesized
guccccccaaccagacucca

SEQ ID NO: 965 - RNA, 20 nt, Artificial Sequence
  synthesized
guccccccacccagacucca

SEQ ID NO: 966 - RNA, 20 nt, Artificial Sequence
  synthesized
gucuggguggggggacccac

SEQ ID NO: 967 - RNA, 20 nt, Artificial Sequence
  synthesized
gucugguuggggggacccac

SEQ ID NO: 968 - RNA, 20 nt, Artificial Sequence
  synthesized
guggagucugggugggggga

SEQ ID NO: 969 - RNA, 20 nt, Artificial Sequence
  synthesized
guggggggacccacucuugg

SEQ ID NO: 970 - RNA, 20 nt, Artificial Sequence
  synthesized
guggguccccccaaccagac

SEQ ID NO: 971 - RNA, 20 nt, Artificial Sequence
  synthesized
guggguccccccacccagac

SEQ ID NO: 972 - RNA, 20 nt, Artificial Sequence
  synthesized
guuggggggacccacucuug

SEQ ID NO: 973 - RNA, 20 nt, Artificial Sequence
  synthesized
uccccccaaccagacuccac

SEQ ID NO: 974 - RNA, 20 nt, Artificial Sequence
  synthesized
uccccccacccagacuccac

SEQ ID NO: 975 - RNA, 20 nt, Artificial Sequence
  synthesized
uggagucuggguggggggac

SEQ ID NO: 976 - RNA, 20 nt, Artificial Sequence
  synthesized
uggagucugguuggggggac

SEQ ID NO: 977 - RNA, 20 nt, Artificial Sequence
  synthesized
uggguccccccacccagacu

SEQ ID NO: 978 - RNA, 20 nt, Artificial Sequence
  synthesized
uguggagucugggugggggg

SEQ ID NO: 979 - RNA, 20 nt, Artificial Sequence
  synthesized
uguggagucugguugggggg

SEQ ID NO: 980 - RNA, 20 nt, Artificial Sequence
  synthesized
uuggggggacccacucuugg

SEQ ID NO: 981 - RNA, 20 nt, Artificial Sequence
  synthesized
aacggugggcuugggagugc

SEQ ID NO: 982 - RNA, 20 nt, Artificial Sequence
  synthesized
aacggugggcuugggagugg

SEQ ID NO: 983 - RNA, 20 nt, Artificial Sequence
  synthesized
aaggcagccacucccaagcc

SEQ ID NO: 984 - RNA, 20 nt, Artificial Sequence
  synthesized
aaggcaggcacucccaagcc

SEQ ID NO: 985 - RNA, 20 nt, Artificial Sequence
  synthesized
acaauaaggcagccacuccc

SEQ ID NO: 986 - RNA, 20 nt, Artificial Sequence
  synthesized
acaauaaggcaggcacuccc

SEQ ID NO: 987 - RNA, 20 nt, Artificial Sequence
  synthesized
acggugggcuugggagugcc

SEQ ID NO: 988 - RNA, 20 nt, Artificial Sequence
  synthesized
acggugggcuugggaguggc

SEQ ID NO: 989 - RNA, 20 nt, Artificial Sequence
  synthesized
agccacucccaagcccaccg

SEQ ID NO: 990 - RNA, 20 nt, Artificial Sequence
  synthesized
aggcacucccaagcccaccg

SEQ ID NO: 991 - RNA, 20 nt, Artificial Sequence
  synthesized
aggcagccacucccaagccc

SEQ ID NO: 992 - RNA, 20 nt, Artificial Sequence
  synthesized
aggcaggcacucccaagccc

SEQ ID NO: 993 - RNA, 20 nt, Artificial Sequence
  synthesized
auaaggcagccacucccaag

SEQ ID NO: 994 - RNA, 20 nt, Artificial Sequence
  synthesized
auaaggcaggcacucccaag

SEQ ID NO: 995 - RNA, 20 nt, Artificial Sequence
  synthesized
caauaaggcagccacuccca

SEQ ID NO: 996 - RNA, 20 nt, Artificial Sequence
  synthesized
caauaaggcaggcacuccca

SEQ ID NO: 997 - RNA, 20 nt, Artificial Sequence
  synthesized
cagccacucccaagcccacc

SEQ ID NO: 998 - RNA, 20 nt, Artificial Sequence
  synthesized
caggcacucccaagcccacc

SEQ ID NO: 999 - RNA, 20 nt, Artificial Sequence
  synthesized
ccacucccaagcccaccguu

SEQ ID NO: 1000 - RNA, 20 nt, Artificial Sequence
  synthesized
ccugccuuauuguagagacc

SEQ ID NO: 1001 - RNA, 20 nt, Artificial Sequence
  synthesized
cggugggcuugggagugccu

SEQ ID NO: 1002 - RNA, 20 nt, Artificial Sequence
  synthesized
cggugggcuugggaguggcu

SEQ ID NO: 1003 - RNA, 20 nt, Artificial Sequence
  synthesized
cucuacaauaaggcagccac

SEQ ID NO: 1004 - RNA, 20 nt, Artificial Sequence
  synthesized
cucuacaauaaggcaggcac

SEQ ID NO: 1005 - RNA, 20 nt, Artificial Sequence
  synthesized
cuugggagugccugccuuau

SEQ ID NO: 1006 - RNA, 20 nt, Artificial Sequence
  synthesized
cuugggaguggcugccuuau

SEQ ID NO: 1007 - RNA, 20 nt, Artificial Sequence
  synthesized
gcacucccaagcccaccguu

SEQ ID NO: 1008 - RNA, 20 nt, Artificial Sequence
  synthesized
gcagccacucccaagcccac

SEQ ID NO: 1009 - RNA, 20 nt, Artificial Sequence
  synthesized
gcaggcacucccaagcccac

SEQ ID NO: 1010 - RNA, 20 nt, Artificial Sequence
  synthesized
gccacucccaagcccaccgu

SEQ ID NO: 1011 - RNA, 20 nt, Artificial Sequence
  synthesized
gccugccuuauuguagagac

SEQ ID NO: 1012 - RNA, 20 nt, Artificial Sequence
  synthesized
gcugccuuauuguagagacc

SEQ ID NO: 1013 - RNA, 20 nt, Artificial Sequence
  synthesized
gcuugggagugccugccuua

SEQ ID NO: 1014 - RNA, 20 nt, Artificial Sequence
  synthesized
gcuugggaguggcugccuua

SEQ ID NO: 1015 - RNA, 20 nt, Artificial Sequence
  synthesized
ggagugccugccuuauugua

SEQ ID NO: 1016 - RNA, 20 nt, Artificial Sequence
  synthesized
ggaguggcugccuuauugua

SEQ ID NO: 1017 - RNA, 20 nt, Artificial Sequence
  synthesized
ggcacucccaagcccaccgu

SEQ ID NO: 1018 - RNA, 20 nt, Artificial Sequence
  synthesized
ggcagccacucccaagccca

SEQ ID NO: 1019 - RNA, 20 nt, Artificial Sequence
  synthesized
ggcaggcacucccaagccca

SEQ ID NO: 1020 - RNA, 20 nt, Artificial Sequence
  synthesized
ggcugccuuauuguagagac

SEQ ID NO: 1021 - RNA, 20 nt, Artificial Sequence
  synthesized
ggcuugggagugccugccuu

SEQ ID NO: 1022 - RNA, 20 nt, Artificial Sequence
  synthesized
ggcuugggaguggcugccuu

SEQ ID NO: 1023 - RNA, 20 nt, Artificial Sequence
  synthesized
gggcuugggagugccugccu

SEQ ID NO: 1024 - RNA, 20 nt, Artificial Sequence
  synthesized
gggcuugggaguggcugccu

SEQ ID NO: 1025 - RNA, 20 nt, Artificial Sequence
  synthesized
ggucucuacaauaaggcagc

SEQ ID NO: 1026 - RNA, 20 nt, Artificial Sequence
  synthesized
ggucucuacaauaaggcagg

SEQ ID NO: 1027 - RNA, 20 nt, Artificial Sequence
  synthesized
ggugggcuugggagugccug

SEQ ID NO: 1028 - RNA, 20 nt, Artificial Sequence
  synthesized
ggugggcuugggaguggcug

SEQ ID NO: 1029 - RNA, 20 nt, Artificial Sequence
  synthesized
gucucuacaauaaggcagcc

SEQ ID NO: 1030 - RNA, 20 nt, Artificial Sequence
  synthesized
gugccugccuuauuguagag

SEQ ID NO: 1031 - RNA, 20 nt, Artificial Sequence
  synthesized
guggcugccuuauuguagag

SEQ ID NO: 1032 - RNA, 20 nt, Artificial Sequence
  synthesized
gugggcuugggagugccugc

SEQ ID NO: 1033 - RNA, 20 nt, Artificial Sequence
  synthesized
gugggcuugggaguggcugc

SEQ ID NO: 1034 - RNA, 20 nt, Artificial Sequence
  synthesized
uaaggcagccacucccaagc

SEQ ID NO: 1035 - RNA, 20 nt, Artificial Sequence
  synthesized
uaaggcaggcacucccaagc

SEQ ID NO: 1036 - RNA, 20 nt, Artificial Sequence
  synthesized
uacaauaaggcagccacucc

SEQ ID NO: 1037 - RNA, 20 nt, Artificial Sequence
  synthesized
uacaauaaggcaggcacucc

SEQ ID NO: 1038 - RNA, 20 nt, Artificial Sequence
  synthesized
ucuacaauaaggcagccacu

SEQ ID NO: 1039 - RNA, 20 nt, Artificial Sequence
  synthesized
ucuacaauaaggcaggcacu

SEQ ID NO: 1040 - RNA, 20 nt, Artificial Sequence
  synthesized
ucucuacaauaaggcagcca

SEQ ID NO: 1041 - RNA, 20 nt, Artificial Sequence
  synthesized
ucucuacaauaaggcaggca

SEQ ID NO: 1042 - RNA, 20 nt, Artificial Sequence
  synthesized
ugccugccuuauuguagaga

SEQ ID NO: 1043 - RNA, 20 nt, Artificial Sequence
  synthesized
uggcugccuuauuguagaga

SEQ ID NO: 1044 - RNA, 20 nt, Artificial Sequence
  synthesized
ugggagugccugccuuauug

SEQ ID NO: 1045 - RNA, 20 nt, Artificial Sequence
  synthesized
ugggaguggcugccuuauug

SEQ ID NO: 1046 - RNA, 20 nt, Artificial Sequence
  synthesized
ugggcuugggagugccugcc

SEQ ID NO: 1047 - RNA, 20 nt, Artificial Sequence
  synthesized
ugggcuugggaguggcugcc

SEQ ID NO: 1048 - RNA, 20 nt, Artificial Sequence
  synthesized
uugggagugccugccuuauu

SEQ ID NO: 1049 - RNA, 20 nt, Artificial Sequence
  synthesized
uugggaguggcugccuuauu

SEQ ID NO: 1050 - RNA, 20 nt, Artificial Sequence
  synthesized
aaacacagacuguuacaucu

SEQ ID NO: 1051 - RNA, 20 nt, Artificial Sequence
  synthesized
aaacacagacuguuccaucu

SEQ ID NO: 1052 - RNA, 20 nt, Artificial Sequence
  synthesized
acacagacuguuacaucugu

SEQ ID NO: 1053 - RNA, 20 nt, Artificial Sequence
  synthesized
acacagacuguuccaucugu

SEQ ID NO: 1054 - RNA, 20 nt, Artificial Sequence
  synthesized
acacagauggaacagucugu

SEQ ID NO: 1055 - RNA, 20 nt, Artificial Sequence
  synthesized
acacagauguaacagucugu

SEQ ID NO: 1056 - RNA, 20 nt, Artificial Sequence
  synthesized
acagacuguuacaucugugu

SEQ ID NO: 1057 - RNA, 20 nt, Artificial Sequence
  synthesized
acagacuguuccaucugugu

SEQ ID NO: 1058 - RNA, 20 nt, Artificial Sequence
  synthesized
acagauggaacagucugugu

SEQ ID NO: 1059 - RNA, 20 nt, Artificial Sequence
  synthesized
acagauguaacagucugugu

SEQ ID NO: 1060 - RNA, 20 nt, Artificial Sequence
  synthesized
agauggaacagucuguguuu

SEQ ID NO: 1061 - RNA, 20 nt, Artificial Sequence
  synthesized
aggaaaacacagacuguucc

SEQ ID NO: 1062 - RNA, 20 nt, Artificial Sequence
  synthesized
auggaacagucuguguuuuc

SEQ ID NO: 1063 - RNA, 20 nt, Artificial Sequence
  synthesized
auguaacagucuguguuuuc

SEQ ID NO: 1064 - RNA, 20 nt, Artificial Sequence
  synthesized
cacacagauggaacagucug

SEQ ID NO: 1065 - RNA, 20 nt, Artificial Sequence
  synthesized
cacacagauguaacagucug

SEQ ID NO: 1066 - RNA, 20 nt, Artificial Sequence
  synthesized
cacagacuguuacaucugug

SEQ ID NO: 1067 - RNA, 20 nt, Artificial Sequence
  synthesized
cacagacuguuccaucugug

SEQ ID NO: 1068 - RNA, 20 nt, Artificial Sequence
  synthesized
cacagauggaacagucugug

SEQ ID NO: 1069 - RNA, 20 nt, Artificial Sequence
  synthesized
cacagauguaacagucugug

SEQ ID NO: 1070 - RNA, 20 nt, Artificial Sequence
  synthesized
cagacuguuacaucugugug

SEQ ID NO: 1071 - RNA, 20 nt, Artificial Sequence
  synthesized
cagacuguuccaucugugug

SEQ ID NO: 1072 - RNA, 20 nt, Artificial Sequence
  synthesized
cagauggaacagucuguguu

SEQ ID NO: 1073 - RNA, 20 nt, Artificial Sequence
  synthesized
cagauguaacagucuguguu

SEQ ID NO: 1074 - RNA, 20 nt, Artificial Sequence
  synthesized
caggaaaacacagacuguuc

SEQ ID NO: 1075 - RNA, 20 nt, Artificial Sequence
  synthesized
ccccucugcacacagaugga

SEQ ID NO: 1076 - RNA, 20 nt, Artificial Sequence
  synthesized
ccccucugcacacagaugua

SEQ ID NO: 1077 - RNA, 20 nt, Artificial Sequence
  synthesized
cccucugcacacagauggaa

SEQ ID NO: 1078 - RNA, 20 nt, Artificial Sequence
  synthesized
cccucugcacacagauguaa

SEQ ID NO: 1079 - RNA, 20 nt, Artificial Sequence
  synthesized
ccucugcacacagauggaac

SEQ ID NO: 1080 - RNA, 20 nt, Artificial Sequence
  synthesized
ccucugcacacagauguaac

SEQ ID NO: 1081 - RNA, 20 nt, Artificial Sequence
  synthesized
cucugcacacagauggaaca

SEQ ID NO: 1082 - RNA, 20 nt, Artificial Sequence
  synthesized
cucugcacacagauguaaca

SEQ ID NO: 1083 - RNA, 20 nt, Artificial Sequence
  synthesized
cugcacacagauggaacagu

SEQ ID NO: 1084 - RNA, 20 nt, Artificial Sequence
  synthesized
cugcacacagauguaacagu

SEQ ID NO: 1085 - RNA, 20 nt, Artificial Sequence
  synthesized
gaaaacacagacuguuacau

SEQ ID NO: 1086 - RNA, 20 nt, Artificial Sequence
  synthesized
gaaaacacagacuguuccau

SEQ ID NO: 1087 - RNA, 20 nt, Artificial Sequence
  synthesized
gaacagucuguguuuuccug

SEQ ID NO: 1088 - RNA, 20 nt, Artificial Sequence
  synthesized
gacuguuacaucugugugca

SEQ ID NO: 1089 - RNA, 20 nt, Artificial Sequence
  synthesized
gacuguuccaucugugugca

SEQ ID NO: 1090 - RNA, 20 nt, Artificial Sequence
  synthesized
gcacacagauggaacagucu

SEQ ID NO: 1091 - RNA, 20 nt, Artificial Sequence
  synthesized
gcacacagauguaacagucu

SEQ ID NO: 1092 - RNA, 20 nt, Artificial Sequence
  synthesized
ggaaaacacagacuguuaca

SEQ ID NO: 1093 - RNA, 20 nt, Artificial Sequence
  synthesized
ggaaaacacagacuguucca

SEQ ID NO: 1094 - RNA, 20 nt, Artificial Sequence
  synthesized
ggaacagucuguguuuuccu

SEQ ID NO: 1095 - RNA, 20 nt, Artificial Sequence
  synthesized
guaacagucuguguuuuccu

SEQ ID NO: 1096 - RNA, 20 nt, Artificial Sequence
  synthesized
uaacagucuguguuuuccug

SEQ ID NO: 1097 - RNA, 20 nt, Artificial Sequence
  synthesized
ucugcacacagauggaacag

SEQ ID NO: 1098 - RNA, 20 nt, Artificial Sequence
  synthesized
ucugcacacagauguaacag

SEQ ID NO: 1099 - RNA, 20 nt, Artificial Sequence
  synthesized
uuccaucugugugcagaggg

SEQ ID NO: 1100 - RNA, 20 nt, Artificial Sequence
  synthesized
aaggcaggggcagcaugcau

SEQ ID NO: 1101 - RNA, 20 nt, Artificial Sequence
  synthesized
aaggcaggggcagcauguau

SEQ ID NO: 1102 - RNA, 20 nt, Artificial Sequence
  synthesized
acggccauacaugcugcccc

SEQ ID NO: 1103 - RNA, 20 nt, Artificial Sequence
  synthesized
acggccaugcaugcugcccc

SEQ ID NO: 1104 - RNA, 20 nt, Artificial Sequence
  synthesized
agcaugcauggccgugaaga

SEQ ID NO: 1105 - RNA, 20 nt, Artificial Sequence
  synthesized
agcauguauggccgugaaga

SEQ ID NO: 1106 - RNA, 20 nt, Artificial Sequence
  synthesized
aggcaggggcagcaugcaug

SEQ ID NO: 1107 - RNA, 20 nt, Artificial Sequence
  synthesized
aggcaggggcagcauguaug

SEQ ID NO: 1108 - RNA, 20 nt, Artificial Sequence
  synthesized
auacaugcugccccugccuu

SEQ ID NO: 1109 - RNA, 20 nt, Artificial Sequence
  synthesized
augcaugcugccccugccuu

SEQ ID NO: 1110 - RNA, 20 nt, Artificial Sequence
  synthesized
cacggccauacaugcugccc

SEQ ID NO: 1111 - RNA, 20 nt, Artificial Sequence
  synthesized
cacggccaugcaugcugccc

SEQ ID NO: 1112 - RNA, 20 nt, Artificial Sequence
  synthesized
cagcaugcauggccgugaag

SEQ ID NO: 1113 - RNA, 20 nt, Artificial Sequence
  synthesized
cagcauguauggccgugaag

SEQ ID NO: 1114 - RNA, 20 nt, Artificial Sequence
  synthesized
caggggcagcaugcauggcc

SEQ ID NO: 1115 - RNA, 20 nt, Artificial Sequence
  synthesized
caggggcagcauguauggcc

SEQ ID NO: 1116 - RNA, 20 nt, Artificial Sequence
  synthesized
cauacaugcugccccugccu

SEQ ID NO: 1117 - RNA, 20 nt, Artificial Sequence
  synthesized
caugcaugcugccccugccu

SEQ ID NO: 1118 - RNA, 20 nt, Artificial Sequence
  synthesized
cauggccgugaagaccacgg

SEQ ID NO: 1119 - RNA, 20 nt, Artificial Sequence
  synthesized
ccauacaugcugccccugcc

SEQ ID NO: 1120 - RNA, 20 nt, Artificial Sequence
  synthesized
ccaugcaugcugccccugcc

SEQ ID NO: 1121 - RNA, 20 nt, Artificial Sequence
  synthesized
ccguggucuucacggccaua

SEQ ID NO: 1122 - RNA, 20 nt, Artificial Sequence
  synthesized
ccguggucuucacggccaug

SEQ ID NO: 1123 - RNA, 20 nt, Artificial Sequence
  synthesized
cggccauacaugcugccccu

SEQ ID NO: 1124 - RNA, 20 nt, Artificial Sequence
  synthesized
cggccaugcaugcugccccu

SEQ ID NO: 1125 - RNA, 20 nt, Artificial Sequence
  synthesized
cguggucuucacggccauac

SEQ ID NO: 1126 - RNA, 20 nt, Artificial Sequence
  synthesized
cguggucuucacggccaugc

SEQ ID NO: 1127 - RNA, 20 nt, Artificial Sequence
  synthesized
cuucacggccauacaugcug

SEQ ID NO: 1128 - RNA, 20 nt, Artificial Sequence
  synthesized
cuucacggccaugcaugcug

SEQ ID NO: 1129 - RNA, 20 nt, Artificial Sequence
  synthesized
gcagcaugcauggccgugaa

SEQ ID NO: 1130 - RNA, 20 nt, Artificial Sequence
  synthesized
gcagcauguauggccgugaa

SEQ ID NO: 1131 - RNA, 20 nt, Artificial Sequence
  synthesized
gcaugcauggccgugaagac

SEQ ID NO: 1132 - RNA, 20 nt, Artificial Sequence
  synthesized
gcauguauggccgugaagac

SEQ ID NO: 1133 - RNA, 20 nt, Artificial Sequence
  synthesized
gccauacaugcugccccugc

SEQ ID NO: 1134 - RNA, 20 nt, Artificial Sequence
  synthesized
gccaugcaugcugccccugc

SEQ ID NO: 1135 - RNA, 20 nt, Artificial Sequence
  synthesized
ggaaggcaggggcagcaugc

SEQ ID NO: 1136 - RNA, 20 nt, Artificial Sequence
  synthesized
ggaaggcaggggcagcaugu

SEQ ID NO: 1137 - RNA, 20 nt, Artificial Sequence
  synthesized
ggcaggggcagcaugcaugg

SEQ ID NO: 1138 - RNA, 20 nt, Artificial Sequence
  synthesized
ggcaggggcagcauguaugg

SEQ ID NO: 1139 - RNA, 20 nt, Artificial Sequence
  synthesized
ggccauacaugcugccccug

SEQ ID NO: 1140 - RNA, 20 nt, Artificial Sequence
  synthesized
ggccaugcaugcugccccug

SEQ ID NO: 1141 - RNA, 20 nt, Artificial Sequence
  synthesized
gggcagcaugcauggccgug

SEQ ID NO: 1142 - RNA, 20 nt, Artificial Sequence
  synthesized
gggcagcauguauggccgug

SEQ ID NO: 1143 - RNA, 20 nt, Artificial Sequence
  synthesized
ggucuucacggccauacaug

SEQ ID NO: 1144 - RNA, 20 nt, Artificial Sequence
  synthesized
ggucuucacggccaugcaug

SEQ ID NO: 1145 - RNA, 20 nt, Artificial Sequence
  synthesized
guauggccgugaagaccacg

SEQ ID NO: 1146 - RNA, 20 nt, Artificial Sequence
  synthesized
gucuucacggccauacaugc

SEQ ID NO: 1147 - RNA, 20 nt, Artificial Sequence
  synthesized
gucuucacggccaugcaugc

SEQ ID NO: 1148 - RNA, 20 nt, Artificial Sequence
  synthesized
guggucuucacggccauaca

SEQ ID NO: 1149 - RNA, 20 nt, Artificial Sequence
  synthesized
guggucuucacggccaugca

SEQ ID NO: 1150 - RNA, 20 nt, Artificial Sequence
  synthesized
uacaugcugccccugccuuc

SEQ ID NO: 1151 - RNA, 20 nt, Artificial Sequence
  synthesized
uauggccgugaagaccacgg

SEQ ID NO: 1152 - RNA, 20 nt, Artificial Sequence
  synthesized
ucacggccauacaugcugcc

SEQ ID NO: 1153 - RNA, 20 nt, Artificial Sequence
  synthesized
ucacggccaugcaugcugcc

SEQ ID NO: 1154 - RNA, 20 nt, Artificial Sequence
  synthesized
ucuucacggccauacaugcu

SEQ ID NO: 1155 - RNA, 20 nt, Artificial Sequence
  synthesized
ucuucacggccaugcaugcu

SEQ ID NO: 1156 - RNA, 20 nt, Artificial Sequence
  synthesized
ugcaugcugccccugccuuc

SEQ ID NO: 1157 - RNA, 20 nt, Artificial Sequence
  synthesized
uggucuucacggccauacau

SEQ ID NO: 1158 - RNA, 20 nt, Artificial Sequence
  synthesized
uggucuucacggccaugcau

SEQ ID NO: 1159 - RNA, 20 nt, Artificial Sequence
  synthesized
uucacggccauacaugcugc

SEQ ID NO: 1160 - RNA, 20 nt, Artificial Sequence
  synthesized
uucacggccaugcaugcugc

SEQ ID NO: 1161 - RNA, 20 nt, Artificial Sequence
  synthesized
aagggcuguuguccccugag

SEQ ID NO: 1162 - RNA, 20 nt, Artificial Sequence
  synthesized
aagggcuguuguucccugag

SEQ ID NO: 1163 - RNA, 20 nt, Artificial Sequence
  synthesized
aggaagggcuguuguccccu

SEQ ID NO: 1164 - RNA, 20 nt, Artificial Sequence
  synthesized
aggaagggcuguuguucccu

SEQ ID NO: 1165 - RNA, 20 nt, Artificial Sequence
  synthesized
agggcuguuguccccugaga

SEQ ID NO: 1166 - RNA, 20 nt, Artificial Sequence
  synthesized
agggcuguuguucccugaga

SEQ ID NO: 1167 - RNA, 20 nt, Artificial Sequence
  synthesized
cagggaacaacagcccuucc

SEQ ID NO: 1168 - RNA, 20 nt, Artificial Sequence
  synthesized
caggggacaacagcccuucc

SEQ ID NO: 1169 - RNA, 20 nt, Artificial Sequence
  synthesized
ccccugagacccccaccuag

SEQ ID NO: 1170 - RNA, 20 nt, Artificial Sequence
  synthesized
ccgaggaagggcuguugucc

SEQ ID NO: 1171 - RNA, 20 nt, Artificial Sequence
  synthesized
ccgaggaagggcuguuguuc

SEQ ID NO: 1172 - RNA, 20 nt, Artificial Sequence
  synthesized
cgaggaagggcuguuguccc

SEQ ID NO: 1173 - RNA, 20 nt, Artificial Sequence
  synthesized
cgaggaagggcuguuguucc

SEQ ID NO: 1174 - RNA, 20 nt, Artificial Sequence
  synthesized
cuaggugggggucucaggga

SEQ ID NO: 1175 - RNA, 20 nt, Artificial Sequence
  synthesized
cuaggugggggucucagggg

SEQ ID NO: 1176 - RNA, 20 nt, Artificial Sequence
  synthesized
cucagggaacaacagcccuu

SEQ ID NO: 1177 - RNA, 20 nt, Artificial Sequence
  synthesized
cucaggggacaacagcccuu

SEQ ID NO: 1178 - RNA, 20 nt, Artificial Sequence
  synthesized
cuguuguccccugagacccc

SEQ ID NO: 1179 - RNA, 20 nt, Artificial Sequence
  synthesized
cuguuguucccugagacccc

SEQ ID NO: 1180 - RNA, 20 nt, Artificial Sequence
  synthesized
gaagggcuguuguucccuga

SEQ ID NO: 1181 - RNA, 20 nt, Artificial Sequence
  synthesized
gacaacagcccuuccucggc

SEQ ID NO: 1182 - RNA, 20 nt, Artificial Sequence
  synthesized
gccgaggaagggcuguuguc

SEQ ID NO: 1183 - RNA, 20 nt, Artificial Sequence
  synthesized
gccgaggaagggcuguuguu

SEQ ID NO: 1184 - RNA, 20 nt, Artificial Sequence
  synthesized
gcuguuguccccugagaccc

SEQ ID NO: 1185 - RNA, 20 nt, Artificial Sequence
  synthesized
gcuguuguucccugagaccc

SEQ ID NO: 1186 - RNA, 20 nt, Artificial Sequence
  synthesized
ggaacaacagcccuuccucg

SEQ ID NO: 1187 - RNA, 20 nt, Artificial Sequence
  synthesized
ggacaacagcccuuccucgg

SEQ ID NO: 1188 - RNA, 20 nt, Artificial Sequence
  synthesized
ggcuguuguccccugagacc

SEQ ID NO: 1189 - RNA, 20 nt, Artificial Sequence
  synthesized
ggcuguuguucccugagacc

SEQ ID NO: 1190 - RNA, 20 nt, Artificial Sequence
  synthesized
gggaacaacagcccuuccuc

SEQ ID NO: 1191 - RNA, 20 nt, Artificial Sequence
  synthesized
gggacaacagcccuuccucg

SEQ ID NO: 1192 - RNA, 20 nt, Artificial Sequence
  synthesized
ggggacaacagcccuuccuc

SEQ ID NO: 1193 - RNA, 20 nt, Artificial Sequence
  synthesized
gggggucucagggaacaaca

SEQ ID NO: 1194 - RNA, 20 nt, Artificial Sequence
  synthesized
gggggucucaggggacaaca

SEQ ID NO: 1195 - RNA, 20 nt, Artificial Sequence
  synthesized
ggggucucagggaacaacag

SEQ ID NO: 1196 - RNA, 20 nt, Artificial Sequence
  synthesized
ggggucucaggggacaacag

SEQ ID NO: 1197 - RNA, 20 nt, Artificial Sequence
  synthesized
gggucucagggaacaacagc

SEQ ID NO: 1198 - RNA, 20 nt, Artificial Sequence
  synthesized
gggucucaggggacaacagc

SEQ ID NO: 1199 - RNA, 20 nt, Artificial Sequence
  synthesized
ggucucagggaacaacagcc

SEQ ID NO: 1200 - RNA, 20 nt, Artificial Sequence
  synthesized
ggugggggucucagggaaca

SEQ ID NO: 1201 - RNA, 20 nt, Artificial Sequence
  synthesized
ggugggggucucaggggaca

SEQ ID NO: 1202 - RNA, 20 nt, Artificial Sequence
  synthesized
guccccugagacccccaccu

SEQ ID NO: 1203 - RNA, 20 nt, Artificial Sequence
  synthesized
gucucagggaacaacagccc

SEQ ID NO: 1204 - RNA, 20 nt, Artificial Sequence
  synthesized
gugggggucucagggaacaa

SEQ ID NO: 1205 - RNA, 20 nt, Artificial Sequence
  synthesized
gugggggucucaggggacaa

SEQ ID NO: 1206 - RNA, 20 nt, Artificial Sequence
  synthesized
guucccugagacccccaccu

SEQ ID NO: 1207 - RNA, 20 nt, Artificial Sequence
  synthesized
uaggugggggucucagggaa

SEQ ID NO: 1208 - RNA, 20 nt, Artificial Sequence
  synthesized
uaggugggggucucagggga

SEQ ID NO: 1209 - RNA, 20 nt, Artificial Sequence
  synthesized
ucagggaacaacagcccuuc

SEQ ID NO: 1210 - RNA, 20 nt, Artificial Sequence
  synthesized
ucaggggacaacagcccuuc

SEQ ID NO: 1211 - RNA, 20 nt, Artificial Sequence
  synthesized
uccccugagacccccaccua

SEQ ID NO: 1212 - RNA, 20 nt, Artificial Sequence
  synthesized
ucccugagacccccaccuag

SEQ ID NO: 1213 - RNA, 20 nt, Artificial Sequence
  synthesized
ucucagggaacaacagcccu

SEQ ID NO: 1214 - RNA, 20 nt, Artificial Sequence
  synthesized
ucucaggggacaacagcccu

SEQ ID NO: 1215 - RNA, 20 nt, Artificial Sequence
  synthesized
ugggggucucagggaacaac

SEQ ID NO: 1216 - RNA, 20 nt, Artificial Sequence
  synthesized
ugggggucucaggggacaac

SEQ ID NO: 1217 - RNA, 20 nt, Artificial Sequence
  synthesized
uguccccugagacccccacc

SEQ ID NO: 1218 - RNA, 20 nt, Artificial Sequence
  synthesized
uguucccugagacccccacc

SEQ ID NO: 1219 - RNA, 20 nt, Artificial Sequence
  synthesized
uguuguccccugagaccccc

SEQ ID NO: 1220 - RNA, 20 nt, Artificial Sequence
  synthesized
uguuguucccugagaccccc

SEQ ID NO: 1221 - RNA, 20 nt, Artificial Sequence
  synthesized
uucccugagacccccaccua

SEQ ID NO: 1222 - RNA, 20 nt, Artificial Sequence
  synthesized
uuguccccugagacccccac

SEQ ID NO: 1223 - RNA, 20 nt, Artificial Sequence
  synthesized
uuguucccugagacccccac

SEQ ID NO: 1224 - RNA, 20 nt, Artificial Sequence
  synthesized
aaaaguucuuacauaagcag

SEQ ID NO: 1225 - RNA, 20 nt, Artificial Sequence
  synthesized
aaaguucuuacauaagcagc

SEQ ID NO: 1226 - RNA, 20 nt, Artificial Sequence
  synthesized
aagcagccaaccccugggca

SEQ ID NO: 1227 - RNA, 20 nt, Artificial Sequence
  synthesized
aagcggccaaccccugggca

SEQ ID NO: 1228 - RNA, 20 nt, Artificial Sequence
  synthesized
aaguucuuacauaagcagcc

SEQ ID NO: 1229 - RNA, 20 nt, Artificial Sequence
  synthesized
acauaagcagccaaccccug

SEQ ID NO: 1230 - RNA, 20 nt, Artificial Sequence
  synthesized
agcagccaaccccugggcag

SEQ ID NO: 1231 - RNA, 20 nt, Artificial Sequence
  synthesized
agccaaccccugggcagagc

SEQ ID NO: 1232 - RNA, 20 nt, Artificial Sequence
  synthesized
agcggccaaccccugggcag

SEQ ID NO: 1233 - RNA, 20 nt, Artificial Sequence
  synthesized
aguucuuacauaagcagcca

SEQ ID NO: 1234 - RNA, 20 nt, Artificial Sequence
  synthesized
auaagcagccaaccccuggg

SEQ ID NO: 1235 - RNA, 20 nt, Artificial Sequence
  synthesized
auaagcggccaaccccuggg

SEQ ID NO: 1236 - RNA, 20 nt, Artificial Sequence
  synthesized
cagggguuggcugcuuaugu

SEQ ID NO: 1237 - RNA, 20 nt, Artificial Sequence
  synthesized
cauaagcagccaaccccugg

SEQ ID NO: 1238 - RNA, 20 nt, Artificial Sequence
  synthesized
cauaagcggccaaccccugg

SEQ ID NO: 1239 - RNA, 20 nt, Artificial Sequence
  synthesized
ccagggguuggcugcuuaug

SEQ ID NO: 1240 - RNA, 20 nt, Artificial Sequence
  synthesized
cccagggguuggcugcuuau

SEQ ID NO: 1241 - RNA, 20 nt, Artificial Sequence
  synthesized
cggccaaccccugggcagag

SEQ ID NO: 1242 - RNA, 20 nt, Artificial Sequence
  synthesized
cucugcccagggguuggccg

SEQ ID NO: 1243 - RNA, 20 nt, Artificial Sequence
  synthesized
cucugcccagggguuggcug

SEQ ID NO: 1244 - RNA, 20 nt, Artificial Sequence
  synthesized
cugcccagggguuggccgcu

SEQ ID NO: 1245 - RNA, 20 nt, Artificial Sequence
  synthesized
cugcccagggguuggcugcu

SEQ ID NO: 1246 - RNA, 20 nt, Artificial Sequence
  synthesized
cugcuuauguaagaacuuuu

SEQ ID NO: 1247 - RNA, 20 nt, Artificial Sequence
  synthesized
gcagccaaccccugggcaga

SEQ ID NO: 1248 - RNA, 20 nt, Artificial Sequence
  synthesized
gcccagggguuggcugcuua

SEQ ID NO: 1249 - RNA, 20 nt, Artificial Sequence
  synthesized
gcggccaaccccugggcaga

SEQ ID NO: 1250 - RNA, 20 nt, Artificial Sequence
  synthesized
gcucugcccagggguuggcc

SEQ ID NO: 1251 - RNA, 20 nt, Artificial Sequence
  synthesized
gcucugcccagggguuggcu

SEQ ID NO: 1252 - RNA, 20 nt, Artificial Sequence
  synthesized
gcugcuuauguaagaacuuu

SEQ ID NO: 1253 - RNA, 20 nt, Artificial Sequence
  synthesized
ggccaaccccugggcagagc

SEQ ID NO: 1254 - RNA, 20 nt, Artificial Sequence
  synthesized
ggcugcuuauguaagaacuu

SEQ ID NO: 1255 - RNA, 20 nt, Artificial Sequence
  synthesized
gggguuggcugcuuauguaa

SEQ ID NO: 1256 - RNA, 20 nt, Artificial Sequence
  synthesized
ggguuggcugcuuauguaag

SEQ ID NO: 1257 - RNA, 20 nt, Artificial Sequence
  synthesized
gguuggcugcuuauguaaga

SEQ ID NO: 1258 - RNA, 20 nt, Artificial Sequence
  synthesized
guucuuacauaagcagccaa

SEQ ID NO: 1259 - RNA, 20 nt, Artificial Sequence
  synthesized
guuggcugcuuauguaagaa

SEQ ID NO: 1260 - RNA, 20 nt, Artificial Sequence
  synthesized
ucugcccagggguuggccgc

SEQ ID NO: 1261 - RNA, 20 nt, Artificial Sequence
  synthesized
ucugcccagggguuggcugc

SEQ ID NO: 1262 - RNA, 20 nt, Artificial Sequence
  synthesized
ucuuacauaagcagccaacc

SEQ ID NO: 1263 - RNA, 20 nt, Artificial Sequence
  synthesized
ugcccagggguuggcugcuu

SEQ ID NO: 1264 - RNA, 20 nt, Artificial Sequence
  synthesized
uggcugcuuauguaagaacu

SEQ ID NO: 1265 - RNA, 20 nt, Artificial Sequence
  synthesized
uucuuacauaagcagccaac

SEQ ID NO: 1266 - RNA, 20 nt, Artificial Sequence
  synthesized
uuggcugcuuauguaagaac

SEQ ID NO: 1267 - RNA, 20 nt, Artificial Sequence
  synthesized
acccugcgcgaucuucacuu

SEQ ID NO: 1268 - RNA, 20 nt, Artificial Sequence
  synthesized
cacccugcgcgaucuucacu

SEQ ID NO: 1269 - RNA, 20 nt, Artificial Sequence
  synthesized
cccugcgcgaucuucacuuu

SEQ ID NO: 1270 - RNA, 20 nt, Artificial Sequence
  synthesized
cgcgaucuucacuuuauccc

SEQ ID NO: 1271 - RNA, 20 nt, Artificial Sequence
  synthesized
gcgcgaucuucacuuuaucc

SEQ ID NO: 1272 - RNA, 20 nt, Artificial Sequence
  synthesized
ugcgcgaucuucacuuuauc

SEQ ID NO: 1273 - RNA, 20 nt, Artificial Sequence
  synthesized
acaugucggucaccccaagg

SEQ ID NO: 1274 - RNA, 20 nt, Artificial Sequence
  synthesized
acaugucggucaccgcaagg

SEQ ID NO: 1275 - RNA, 20 nt, Artificial Sequence
  synthesized
accaggaccuugcggugacc

SEQ ID NO: 1276 - RNA, 20 nt, Artificial Sequence
  synthesized
accaggaccuuggggugacc

SEQ ID NO: 1277 - RNA, 20 nt, Artificial Sequence
  synthesized
accccaagguccuggugcaa

SEQ ID NO: 1278 - RNA, 20 nt, Artificial Sequence
  synthesized
accgcaagguccuggugcaa

SEQ ID NO: 1279 - RNA, 20 nt, Artificial Sequence
  synthesized
accuugcggugaccgacaug

SEQ ID NO: 1280 - RNA, 20 nt, Artificial Sequence
  synthesized
accuuggggugaccgacaug

SEQ ID NO: 1281 - RNA, 20 nt, Artificial Sequence
  synthesized
aggaccuugcggugaccgac

SEQ ID NO: 1282 - RNA, 20 nt, Artificial Sequence
  synthesized
aggaccuuggggugaccgac

SEQ ID NO: 1283 - RNA, 20 nt, Artificial Sequence
  synthesized
agugacaugucggucacccc

SEQ ID NO: 1284 - RNA, 20 nt, Artificial Sequence
  synthesized
agugacaugucggucaccgc

SEQ ID NO: 1285 - RNA, 20 nt, Artificial Sequence
  synthesized
augucggucaccccaagguc

SEQ ID NO: 1286 - RNA, 20 nt, Artificial Sequence
  synthesized
augucggucaccgcaagguc

SEQ ID NO: 1287 - RNA, 20 nt, Artificial Sequence
  synthesized
auguugcaccaggaccuugc

SEQ ID NO: 1288 - RNA, 20 nt, Artificial Sequence
  synthesized
auguugcaccaggaccuugg

SEQ ID NO: 1289 - RNA, 20 nt, Artificial Sequence
  synthesized
caccaggaccuugcggugac

SEQ ID NO: 1290 - RNA, 20 nt, Artificial Sequence
  synthesized
caccaggaccuuggggugac

SEQ ID NO: 1291 - RNA, 20 nt, Artificial Sequence
  synthesized
caccccaagguccuggugca

SEQ ID NO: 1292 - RNA, 20 nt, Artificial Sequence
  synthesized
caccgcaagguccuggugca

SEQ ID NO: 1293 - RNA, 20 nt, Artificial Sequence
  synthesized
caggaccuugcggugaccga

SEQ ID NO: 1294 - RNA, 20 nt, Artificial Sequence
  synthesized
caggaccuuggggugaccga

SEQ ID NO: 1295 - RNA, 20 nt, Artificial Sequence
  synthesized
caugucggucaccccaaggu

SEQ ID NO: 1296 - RNA, 20 nt, Artificial Sequence
  synthesized
caugucggucaccgcaaggu

SEQ ID NO: 1297 - RNA, 20 nt, Artificial Sequence
  synthesized
ccaagguccuggugcaacau

SEQ ID NO: 1298 - RNA, 20 nt, Artificial Sequence
  synthesized
ccaggaccuugcggugaccg

SEQ ID NO: 1299 - RNA, 20 nt, Artificial Sequence
  synthesized
ccaggaccuuggggugaccg

SEQ ID NO: 1300 - RNA, 20 nt, Artificial Sequence
  synthesized
cccaagguccuggugcaaca

SEQ ID NO: 1301 - RNA, 20 nt, Artificial Sequence
  synthesized
ccccaagguccuggugcaac

SEQ ID NO: 1302 - RNA, 20 nt, Artificial Sequence
  synthesized
ccgcaagguccuggugcaac

SEQ ID NO: 1303 - RNA, 20 nt, Artificial Sequence
  synthesized
ccuugcggugaccgacaugu

SEQ ID NO: 1304 - RNA, 20 nt, Artificial Sequence
  synthesized
ccuuggggugaccgacaugu

SEQ ID NO: 1305 - RNA, 20 nt, Artificial Sequence
  synthesized
cgcaagguccuggugcaaca

SEQ ID NO: 1306 - RNA, 20 nt, Artificial Sequence
  synthesized
cggucaccccaagguccugg

SEQ ID NO: 1307 - RNA, 20 nt, Artificial Sequence
  synthesized
cggucaccgcaagguccugg

SEQ ID NO: 1308 - RNA, 20 nt, Artificial Sequence
  synthesized
cggugaccgacaugucacuc

SEQ ID NO: 1309 - RNA, 20 nt, Artificial Sequence
  synthesized
cuugcggugaccgacauguc

SEQ ID NO: 1310 - RNA, 20 nt, Artificial Sequence
  synthesized
cuuggggugaccgacauguc

SEQ ID NO: 1311 - RNA, 20 nt, Artificial Sequence
  synthesized
gacaugucggucaccccaag

SEQ ID NO: 1312 - RNA, 20 nt, Artificial Sequence
  synthesized
gacaugucggucaccgcaag

SEQ ID NO: 1313 - RNA, 20 nt, Artificial Sequence
  synthesized
gaccuugcggugaccgacau

SEQ ID NO: 1314 - RNA, 20 nt, Artificial Sequence
  synthesized
gaccuuggggugaccgacau

SEQ ID NO: 1315 - RNA, 20 nt, Artificial Sequence
  synthesized
gagugacaugucggucaccc

SEQ ID NO: 1316 - RNA, 20 nt, Artificial Sequence
  synthesized
gagugacaugucggucaccg

SEQ ID NO: 1317 - RNA, 20 nt, Artificial Sequence
  synthesized
gcaagguccuggugcaacau

SEQ ID NO: 1318 - RNA, 20 nt, Artificial Sequence
  synthesized
gcaccaggaccuugcgguga

SEQ ID NO: 1319 - RNA, 20 nt, Artificial Sequence
  synthesized
gcaccaggaccuugggguga

SEQ ID NO: 1320 - RNA, 20 nt, Artificial Sequence
  synthesized
gcggugaccgacaugucacu

SEQ ID NO: 1321 - RNA, 20 nt, Artificial Sequence
  synthesized
ggaccuugcggugaccgaca

SEQ ID NO: 1322 - RNA, 20 nt, Artificial Sequence
  synthesized
ggaccuuggggugaccgaca

SEQ ID NO: 1323 - RNA, 20 nt, Artificial Sequence
  synthesized
ggggugaccgacaugucacu

SEQ ID NO: 1324 - RNA, 20 nt, Artificial Sequence
  synthesized
gggugaccgacaugucacuc

SEQ ID NO: 1325 - RNA, 20 nt, Artificial Sequence
  synthesized
ggucaccccaagguccuggu

SEQ ID NO: 1326 - RNA, 20 nt, Artificial Sequence
  synthesized
ggucaccgcaagguccuggu

SEQ ID NO: 1327 - RNA, 20 nt, Artificial Sequence
  synthesized
gucaccccaagguccuggug

SEQ ID NO: 1328 - RNA, 20 nt, Artificial Sequence
  synthesized
gucaccgcaagguccuggug

SEQ ID NO: 1329 - RNA, 20 nt, Artificial Sequence
  synthesized
gucggucaccccaagguccu

SEQ ID NO: 1330 - RNA, 20 nt, Artificial Sequence
  synthesized
gucggucaccgcaagguccu

SEQ ID NO: 1331 - RNA, 20 nt, Artificial Sequence
  synthesized
gugacaugucggucacccca

SEQ ID NO: 1332 - RNA, 20 nt, Artificial Sequence
  synthesized
gugacaugucggucaccgca

SEQ ID NO: 1333 - RNA, 20 nt, Artificial Sequence
  synthesized
guugcaccaggaccuugcgg

SEQ ID NO: 1334 - RNA, 20 nt, Artificial Sequence
  synthesized
guugcaccaggaccuugggg

SEQ ID NO: 1335 - RNA, 20 nt, Artificial Sequence
  synthesized
ucaccccaagguccuggugc

SEQ ID NO: 1336 - RNA, 20 nt, Artificial Sequence
  synthesized
ucaccgcaagguccuggugc

SEQ ID NO: 1337 - RNA, 20 nt, Artificial Sequence
  synthesized
ucggucaccccaagguccug

SEQ ID NO: 1338 - RNA, 20 nt, Artificial Sequence
  synthesized
ucggucaccgcaagguccug

SEQ ID NO: 1339 - RNA, 20 nt, Artificial Sequence
  synthesized
ugacaugucggucaccccaa

SEQ ID NO: 1340 - RNA, 20 nt, Artificial Sequence
  synthesized
ugacaugucggucaccgcaa

SEQ ID NO: 1341 - RNA, 20 nt, Artificial Sequence
  synthesized
ugcaccaggaccuugcggug

SEQ ID NO: 1342 - RNA, 20 nt, Artificial Sequence
  synthesized
ugcaccaggaccuuggggug

SEQ ID NO: 1343 - RNA, 20 nt, Artificial Sequence
  synthesized
ugcggugaccgacaugucac

SEQ ID NO: 1344 - RNA, 20 nt, Artificial Sequence
  synthesized
uggggugaccgacaugucac

SEQ ID NO: 1345 - RNA, 20 nt, Artificial Sequence
  synthesized
ugucggucaccccaaggucc

SEQ ID NO: 1346 - RNA, 20 nt, Artificial Sequence
  synthesized
ugucggucaccgcaaggucc

SEQ ID NO: 1347 - RNA, 20 nt, Artificial Sequence
  synthesized
uguugcaccaggaccuugcg

SEQ ID NO: 1348 - RNA, 20 nt, Artificial Sequence
  synthesized
uguugcaccaggaccuuggg

SEQ ID NO: 1349 - RNA, 20 nt, Artificial Sequence
  synthesized
uugcaccaggaccuugcggu

SEQ ID NO: 1350 - RNA, 20 nt, Artificial Sequence
  synthesized
uugcaccaggaccuuggggu

SEQ ID NO: 1351 - RNA, 20 nt, Artificial Sequence
  synthesized
uugcggugaccgacauguca

SEQ ID NO: 1352 - RNA, 20 nt, Artificial Sequence
  synthesized
uuggggugaccgacauguca

SEQ ID NO: 1353 - RNA, 20 nt, Artificial Sequence
  synthesized
aaaucuccauaauuucacug

SEQ ID NO: 1354 - RNA, 20 nt, Artificial Sequence
  synthesized
aagccaguaaaauuauggag

SEQ ID NO: 1355 - RNA, 20 nt, Artificial Sequence
  synthesized
aagccagugaaauuauggag

SEQ ID NO: 1356 - RNA, 20 nt, Artificial Sequence
  synthesized
aaucuccauaauuucacugg

SEQ ID NO: 1357 - RNA, 20 nt, Artificial Sequence
  synthesized
aauuucacuggcuucuauca

SEQ ID NO: 1358 - RNA, 20 nt, Artificial Sequence
  synthesized
aauuuuacuggcuucuauca

SEQ ID NO: 1359 - RNA, 20 nt, Artificial Sequence
  synthesized
acaugauagaagccaguaaa

SEQ ID NO: 1360 - RNA, 20 nt, Artificial Sequence
  synthesized
acaugauagaagccagugaa

SEQ ID NO: 1361 - RNA, 20 nt, Artificial Sequence
  synthesized
agccaguaaaauuauggaga

SEQ ID NO: 1362 - RNA, 20 nt, Artificial Sequence
  synthesized
agccagugaaauuauggaga

SEQ ID NO: 1363 - RNA, 20 nt, Artificial Sequence
  synthesized
agugaaauuauggagauuug

SEQ ID NO: 1364 - RNA, 20 nt, Artificial Sequence
  synthesized
auaauuucacuggcuucuau

SEQ ID NO: 1365 - RNA, 20 nt, Artificial Sequence
  synthesized
aucuccauaauuucacuggc

SEQ ID NO: 1366 - RNA, 20 nt, Artificial Sequence
  synthesized
aucuccauaauuuuacuggc

SEQ ID NO: 1367 - RNA, 20 nt, Artificial Sequence
  synthesized
augauagaagccaguaaaau

SEQ ID NO: 1368 - RNA, 20 nt, Artificial Sequence
  synthesized
augauagaagccagugaaau

SEQ ID NO: 1369 - RNA, 20 nt, Artificial Sequence
  synthesized
auuucacuggcuucuaucau

SEQ ID NO: 1370 - RNA, 20 nt, Artificial Sequence
  synthesized
caaaucuccauaauuucacu

SEQ ID NO: 1371 - RNA, 20 nt, Artificial Sequence
  synthesized
cacuggcuucuaucaugucc

SEQ ID NO: 1372 - RNA, 20 nt, Artificial Sequence
  synthesized
cagugaaauuauggagauuu

SEQ ID NO: 1373 - RNA, 20 nt, Artificial Sequence
  synthesized
cauaauuucacuggcuucua

SEQ ID NO: 1374 - RNA, 20 nt, Artificial Sequence
  synthesized
cauaauuuuacuggcuucua

SEQ ID NO: 1375 - RNA, 20 nt, Artificial Sequence
  synthesized
caugauagaagccagugaaa

SEQ ID NO: 1376 - RNA, 20 nt, Artificial Sequence
  synthesized
ccauaauuucacuggcuucu

SEQ ID NO: 1377 - RNA, 20 nt, Artificial Sequence
  synthesized
ccauaauuuuacuggcuucu

SEQ ID NO: 1378 - RNA, 20 nt, Artificial Sequence
  synthesized
cuccauaauuucacuggcuu

SEQ ID NO: 1379 - RNA, 20 nt, Artificial Sequence
  synthesized
cuccauaauuuuacuggcuu

SEQ ID NO: 1380 - RNA, 20 nt, Artificial Sequence
  synthesized
gaagccagugaaauuaugga

SEQ ID NO: 1381 - RNA, 20 nt, Artificial Sequence
  synthesized
gacaugauagaagccaguaa

SEQ ID NO: 1382 - RNA, 20 nt, Artificial Sequence
  synthesized
gacaugauagaagccaguga

SEQ ID NO: 1383 - RNA, 20 nt, Artificial Sequence
  synthesized
gccaguaaaauuauggagau

SEQ ID NO: 1384 - RNA, 20 nt, Artificial Sequence
  synthesized
gccagugaaauuauggagau

SEQ ID NO: 1385 - RNA, 20 nt, Artificial Sequence
  synthesized
ggacaugauagaagccagug

SEQ ID NO: 1386 - RNA, 20 nt, Artificial Sequence
  synthesized
gugaaauuauggagauuuga

SEQ ID NO: 1387 - RNA, 20 nt, Artificial Sequence
  synthesized
uaauuucacuggcuucuauc

SEQ ID NO: 1388 - RNA, 20 nt, Artificial Sequence
  synthesized
uaauuuuacuggcuucuauc

SEQ ID NO: 1389 - RNA, 20 nt, Artificial Sequence
  synthesized
uacuggcuucuaucaugucc

SEQ ID NO: 1390 - RNA, 20 nt, Artificial Sequence
  synthesized
uagaagccaguaaaauuaug

SEQ ID NO: 1391 - RNA, 20 nt, Artificial Sequence
  synthesized
uagaagccagugaaauuaug

SEQ ID NO: 1392 - RNA, 20 nt, Artificial Sequence
  synthesized
ucacuggcuucuaucauguc

SEQ ID NO: 1393 - RNA, 20 nt, Artificial Sequence
  synthesized
uccauaauuucacuggcuuc

SEQ ID NO: 1394 - RNA, 20 nt, Artificial Sequence
  synthesized
uccauaauuuuacuggcuuc

SEQ ID NO: 1395 - RNA, 20 nt, Artificial Sequence
  synthesized
ucuccauaauuucacuggcu

SEQ ID NO: 1396 - RNA, 20 nt, Artificial Sequence
  synthesized
ucuccauaauuuuacuggcu

SEQ ID NO: 1397 - RNA, 20 nt, Artificial Sequence
  synthesized
ugauagaagccaguaaaauu

SEQ ID NO: 1398 - RNA, 20 nt, Artificial Sequence
  synthesized
ugauagaagccagugaaauu

SEQ ID NO: 1399 - RNA, 20 nt, Artificial Sequence
  synthesized
uuacuggcuucuaucauguc

SEQ ID NO: 1400 - RNA, 20 nt, Artificial Sequence
  synthesized
uucacuggcuucuaucaugu

SEQ ID NO: 1401 - RNA, 20 nt, Artificial Sequence
  synthesized
uuuacuggcuucuaucaugu

SEQ ID NO: 1402 - RNA, 20 nt, Artificial Sequence
  synthesized
uuucacuggcuucuaucaug

SEQ ID NO: 1403 - RNA, 20 nt, Artificial Sequence
  synthesized
uuuuacuggcuucuaucaug

SEQ ID NO: 1404 - RNA, 20 nt, Artificial Sequence
  synthesized
aaagcuguccaucaaaggua

SEQ ID NO: 1405 - RNA, 20 nt, Artificial Sequence
  synthesized
aaagcuguccaucgaaggua

SEQ ID NO: 1406 - RNA, 20 nt, Artificial Sequence
  synthesized
aaagguacagauaccacuca

SEQ ID NO: 1407 - RNA, 20 nt, Artificial Sequence
  synthesized
aagcuguccaucaaagguac

SEQ ID NO: 1408 - RNA, 20 nt, Artificial Sequence
  synthesized
aagcuguccaucgaagguac

SEQ ID NO: 1409 - RNA, 20 nt, Artificial Sequence
  synthesized
acaaagcuguccaucaaagg

SEQ ID NO: 1410 - RNA, 20 nt, Artificial Sequence
  synthesized
acaaagcuguccaucgaagg

SEQ ID NO: 1411 - RNA, 20 nt, Artificial Sequence
  synthesized
accuucgauggacagcuuug

SEQ ID NO: 1412 - RNA, 20 nt, Artificial Sequence
  synthesized
accuuugauggacagcuuug

SEQ ID NO: 1413 - RNA, 20 nt, Artificial Sequence
  synthesized
agcuguccaucaaagguaca

SEQ ID NO: 1414 - RNA, 20 nt, Artificial Sequence
  synthesized
agcuguccaucgaagguaca

SEQ ID NO: 1415 - RNA, 20 nt, Artificial Sequence
  synthesized
agugguaucuguaccuucga

SEQ ID NO: 1416 - RNA, 20 nt, Artificial Sequence
  synthesized
agugguaucuguaccuuuga

SEQ ID NO: 1417 - RNA, 20 nt, Artificial Sequence
  synthesized
aucaaagguacagauaccac

SEQ ID NO: 1418 - RNA, 20 nt, Artificial Sequence
  synthesized
aucgaagguacagauaccac

SEQ ID NO: 1419 - RNA, 20 nt, Artificial Sequence
  synthesized
aucuguaccuucgauggaca

SEQ ID NO: 1420 - RNA, 20 nt, Artificial Sequence
  synthesized
aucuguaccuuugauggaca

SEQ ID NO: 1421 - RNA, 20 nt, Artificial Sequence
  synthesized
caaagcuguccaucaaaggu

SEQ ID NO: 1422 - RNA, 20 nt, Artificial Sequence
  synthesized
caaagcuguccaucgaaggu

SEQ ID NO: 1423 - RNA, 20 nt, Artificial Sequence
  synthesized
caaagguacagauaccacuc

SEQ ID NO: 1424 - RNA, 20 nt, Artificial Sequence
  synthesized
cacaaagcuguccaucaaag

SEQ ID NO: 1425 - RNA, 20 nt, Artificial Sequence
  synthesized
cacaaagcuguccaucgaag

SEQ ID NO: 1426 - RNA, 20 nt, Artificial Sequence
  synthesized
caucaaagguacagauacca

SEQ ID NO: 1427 - RNA, 20 nt, Artificial Sequence
  synthesized
caucgaagguacagauacca

SEQ ID NO: 1428 - RNA, 20 nt, Artificial Sequence
  synthesized
ccaucaaagguacagauacc

SEQ ID NO: 1429 - RNA, 20 nt, Artificial Sequence
  synthesized
ccaucgaagguacagauacc

SEQ ID NO: 1430 - RNA, 20 nt, Artificial Sequence
  synthesized
ccuucgauggacagcuuugu

SEQ ID NO: 1431 - RNA, 20 nt, Artificial Sequence
  synthesized
ccuuugauggacagcuuugu

SEQ ID NO: 1432 - RNA, 20 nt, Artificial Sequence
  synthesized
cgaagguacagauaccacuc

SEQ ID NO: 1433 - RNA, 20 nt, Artificial Sequence
  synthesized
cgauggacagcuuugugccc

SEQ ID NO: 1434 - RNA, 20 nt, Artificial Sequence
  synthesized
cuguaccuucgauggacagc

SEQ ID NO: 1435 - RNA, 20 nt, Artificial Sequence
  synthesized
cuguaccuuugauggacagc

SEQ ID NO: 1436 - RNA, 20 nt, Artificial Sequence
  synthesized
cuguccaucaaagguacaga

SEQ ID NO: 1437 - RNA, 20 nt, Artificial Sequence
  synthesized
cuguccaucgaagguacaga

SEQ ID NO: 1438 - RNA, 20 nt, Artificial Sequence
  synthesized
cuucgauggacagcuuugug

SEQ ID NO: 1439 - RNA, 20 nt, Artificial Sequence
  synthesized
cuuugauggacagcuuugug

SEQ ID NO: 1440 - RNA, 20 nt, Artificial Sequence
  synthesized
gaagguacagauaccacuca

SEQ ID NO: 1441 - RNA, 20 nt, Artificial Sequence
  synthesized
gagugguaucuguaccuucg

SEQ ID NO: 1442 - RNA, 20 nt, Artificial Sequence
  synthesized
gagugguaucuguaccuuug

SEQ ID NO: 1443 - RNA, 20 nt, Artificial Sequence
  synthesized
gcacaaagcuguccaucaaa

SEQ ID NO: 1444 - RNA, 20 nt, Artificial Sequence
  synthesized
gcacaaagcuguccaucgaa

SEQ ID NO: 1445 - RNA, 20 nt, Artificial Sequence
  synthesized
gcuguccaucaaagguacag

SEQ ID NO: 1446 - RNA, 20 nt, Artificial Sequence
  synthesized
gcuguccaucgaagguacag

SEQ ID NO: 1447 - RNA, 20 nt, Artificial Sequence
  synthesized
ggcacaaagcuguccaucaa

SEQ ID NO: 1448 - RNA, 20 nt, Artificial Sequence
  synthesized
ggcacaaagcuguccaucga

SEQ ID NO: 1449 - RNA, 20 nt, Artificial Sequence
  synthesized
gggcacaaagcuguccauca

SEQ ID NO: 1450 - RNA, 20 nt, Artificial Sequence
  synthesized
gggcacaaagcuguccaucg

SEQ ID NO: 1451 - RNA, 20 nt, Artificial Sequence
  synthesized
gguaucuguaccuucgaugg

SEQ ID NO: 1452 - RNA, 20 nt, Artificial Sequence
  synthesized
gguaucuguaccuuugaugg

SEQ ID NO: 1453 - RNA, 20 nt, Artificial Sequence
  synthesized
guaccuucgauggacagcuu

SEQ ID NO: 1454 - RNA, 20 nt, Artificial Sequence
  synthesized
guaccuuugauggacagcuu

SEQ ID NO: 1455 - RNA, 20 nt, Artificial Sequence
  synthesized
guaucuguaccuucgaugga

SEQ ID NO: 1456 - RNA, 20 nt, Artificial Sequence
  synthesized
guaucuguaccuuugaugga

SEQ ID NO: 1457 - RNA, 20 nt, Artificial Sequence
  synthesized
guccaucaaagguacagaua

SEQ ID NO: 1458 - RNA, 20 nt, Artificial Sequence
  synthesized
guccaucgaagguacagaua

SEQ ID NO: 1459 - RNA, 20 nt, Artificial Sequence
  synthesized
gugguaucuguaccuucgau

SEQ ID NO: 1460 - RNA, 20 nt, Artificial Sequence
  synthesized
gugguaucuguaccuuugau

SEQ ID NO: 1461 - RNA, 20 nt, Artificial Sequence
  synthesized
uaccuucgauggacagcuuu

SEQ ID NO: 1462 - RNA, 20 nt, Artificial Sequence
  synthesized
uaccuuugauggacagcuuu

SEQ ID NO: 1463 - RNA, 20 nt, Artificial Sequence
  synthesized
uaucuguaccuucgauggac

SEQ ID NO: 1464 - RNA, 20 nt, Artificial Sequence
  synthesized
uaucuguaccuuugauggac

SEQ ID NO: 1465 - RNA, 20 nt, Artificial Sequence
  synthesized
ucaaagguacagauaccacu

SEQ ID NO: 1466 - RNA, 20 nt, Artificial Sequence
  synthesized
uccaucaaagguacagauac

SEQ ID NO: 1467 - RNA, 20 nt, Artificial Sequence
  synthesized
uccaucgaagguacagauac

SEQ ID NO: 1468 - RNA, 20 nt, Artificial Sequence
  synthesized
ucgaagguacagauaccacu

SEQ ID NO: 1469 - RNA, 20 nt, Artificial Sequence
  synthesized
ucgauggacagcuuugugcc

SEQ ID NO: 1470 - RNA, 20 nt, Artificial Sequence
  synthesized
ucuguaccuucgauggacag

SEQ ID NO: 1471 - RNA, 20 nt, Artificial Sequence
  synthesized
ucuguaccuuugauggacag

SEQ ID NO: 1472 - RNA, 20 nt, Artificial Sequence
  synthesized
ugagugguaucuguaccuuc

SEQ ID NO: 1473 - RNA, 20 nt, Artificial Sequence
  synthesized
ugagugguaucuguaccuuu

SEQ ID NO: 1474 - RNA, 20 nt, Artificial Sequence
  synthesized
ugauggacagcuuugugccc

SEQ ID NO: 1475 - RNA, 20 nt, Artificial Sequence
  synthesized
ugguaucuguaccuucgaug

SEQ ID NO: 1476 - RNA, 20 nt, Artificial Sequence
  synthesized
ugguaucuguaccuuugaug

SEQ ID NO: 1477 - RNA, 20 nt, Artificial Sequence
  synthesized
uguaccuucgauggacagcu

SEQ ID NO: 1478 - RNA, 20 nt, Artificial Sequence
  synthesized
uguaccuuugauggacagcu

SEQ ID NO: 1479 - RNA, 20 nt, Artificial Sequence
  synthesized
uguccaucaaagguacagau

SEQ ID NO: 1480 - RNA, 20 nt, Artificial Sequence
  synthesized
uguccaucgaagguacagau

SEQ ID NO: 1481 - RNA, 20 nt, Artificial Sequence
  synthesized
uucgauggacagcuuugugc

SEQ ID NO: 1482 - RNA, 20 nt, Artificial Sequence
  synthesized
uugauggacagcuuugugcc

SEQ ID NO: 1483 - RNA, 20 nt, Artificial Sequence
  synthesized
uuugauggacagcuuugugc

SEQ ID NO: 1484 - RNA, 20 nt, Artificial Sequence
  synthesized
aacuucccaaucuugauggg

SEQ ID NO: 1485 - RNA, 20 nt, Artificial Sequence
  synthesized
aacuucucaaucuugauggg

SEQ ID NO: 1486 - RNA, 20 nt, Artificial Sequence
  synthesized
agaaguuuucaaaggcaggc

SEQ ID NO: 1487 - RNA, 20 nt, Artificial Sequence
  synthesized
caucaagauugagaaguuuu

SEQ ID NO: 1488 - RNA, 20 nt, Artificial Sequence
  synthesized
caucaagauugggaaguuuu

SEQ ID NO: 1489 - RNA, 20 nt, Artificial Sequence
  synthesized
ccaaucuugauggggagaga

SEQ ID NO: 1490 - RNA, 20 nt, Artificial Sequence
  synthesized
ccaucaagauugagaaguuu

SEQ ID NO: 1491 - RNA, 20 nt, Artificial Sequence
  synthesized
cccaaucuugauggggagag

SEQ ID NO: 1492 - RNA, 20 nt, Artificial Sequence
  synthesized
cccaucaagauugagaaguu

SEQ ID NO: 1493 - RNA, 20 nt, Artificial Sequence
  synthesized
ccccaucaagauugagaagu

SEQ ID NO: 1494 - RNA, 20 nt, Artificial Sequence
  synthesized
ccugccuuugaaaacuuccc

SEQ ID NO: 1495 - RNA, 20 nt, Artificial Sequence
  synthesized
ccugccuuugaaaacuucuc

SEQ ID NO: 1496 - RNA, 20 nt, Artificial Sequence
  synthesized
ccuuugaaaacuucccaauc

SEQ ID NO: 1497 - RNA, 20 nt, Artificial Sequence
  synthesized
ccuuugaaaacuucucaauc

SEQ ID NO: 1498 - RNA, 20 nt, Artificial Sequence
  synthesized
cuccccaucaagauugagaa

SEQ ID NO: 1499 - RNA, 20 nt, Artificial Sequence
  synthesized
cuccccaucaagauugggaa

SEQ ID NO: 1500 - RNA, 20 nt, Artificial Sequence
  synthesized
cucuccccaucaagauugag

SEQ ID NO: 1501 - RNA, 20 nt, Artificial Sequence
  synthesized
cucuccccaucaagauuggg

SEQ ID NO: 1502 - RNA, 20 nt, Artificial Sequence
  synthesized
cugccuuugaaaacuuccca

SEQ ID NO: 1503 - RNA, 20 nt, Artificial Sequence
  synthesized
cugccuuugaaaacuucuca

SEQ ID NO: 1504 - RNA, 20 nt, Artificial Sequence
  synthesized
cuucccaaucuugaugggga

SEQ ID NO: 1505 - RNA, 20 nt, Artificial Sequence
  synthesized
gagaaguuuucaaaggcagg

SEQ ID NO: 1506 - RNA, 20 nt, Artificial Sequence
  synthesized
gauugagaaguuuucaaagg

SEQ ID NO: 1507 - RNA, 20 nt, Artificial Sequence
  synthesized
gauugggaaguuuucaaagg

SEQ ID NO: 1508 - RNA, 20 nt, Artificial Sequence
  synthesized
gccugccuuugaaaacuucc

SEQ ID NO: 1509 - RNA, 20 nt, Artificial Sequence
  synthesized
gccugccuuugaaaacuucu

SEQ ID NO: 1510 - RNA, 20 nt, Artificial Sequence
  synthesized
gccuuugaaaacuucccaau

SEQ ID NO: 1511 - RNA, 20 nt, Artificial Sequence
  synthesized
gccuuugaaaacuucucaau

SEQ ID NO: 1512 - RNA, 20 nt, Artificial Sequence
  synthesized
ggaaguuuucaaaggcaggc

SEQ ID NO: 1513 - RNA, 20 nt, Artificial Sequence
  synthesized
gggaaguuuucaaaggcagg

SEQ ID NO: 1514 - RNA, 20 nt, Artificial Sequence
  synthesized
ucaagauugagaaguuuuca

SEQ ID NO: 1515 - RNA, 20 nt, Artificial Sequence
  synthesized
ucaagauugggaaguuuuca

SEQ ID NO: 1516 - RNA, 20 nt, Artificial Sequence
  synthesized
uccccaucaagauugagaag

SEQ ID NO: 1517 - RNA, 20 nt, Artificial Sequence
  synthesized
uccccaucaagauugggaag

SEQ ID NO: 1518 - RNA, 20 nt, Artificial Sequence
  synthesized
ucuccccaucaagauugaga

SEQ ID NO: 1519 - RNA, 20 nt, Artificial Sequence
  synthesized
ucuccccaucaagauuggga

SEQ ID NO: 1520 - RNA, 20 nt, Artificial Sequence
  synthesized
ucucuccccaucaagauugg

SEQ ID NO: 1521 - RNA, 20 nt, Artificial Sequence
  synthesized
ugagaaguuuucaaaggcag

SEQ ID NO: 1522 - RNA, 20 nt, Artificial Sequence
  synthesized
ugccuuugaaaacuucucaa

SEQ ID NO: 1523 - RNA, 20 nt, Artificial Sequence
  synthesized
ugggaaguuuucaaaggcag

SEQ ID NO: 1524 - RNA, 20 nt, Artificial Sequence
  synthesized
uugaaaacuucucaaucuug

SEQ ID NO: 1525 - RNA, 20 nt, Artificial Sequence
  synthesized
uugagaaguuuucaaaggca

SEQ ID NO: 1526 - RNA, 20 nt, Artificial Sequence
  synthesized
uugggaaguuuucaaaggca

SEQ ID NO: 1527 - RNA, 20 nt, Artificial Sequence
  synthesized
uuugaaaacuucccaaucuu

SEQ ID NO: 1528 - RNA, 20 nt, Artificial Sequence
  synthesized
aaaaaugacagacacaggac

SEQ ID NO: 1529 - RNA, 20 nt, Artificial Sequence
  synthesized
aaaaugacagacacaggaca

SEQ ID NO: 1530 - RNA, 20 nt, Artificial Sequence
  synthesized
aaagaugacagacacaggac

SEQ ID NO: 1531 - RNA, 20 nt, Artificial Sequence
  synthesized
aaaugacagacacaggacau

SEQ ID NO: 1532 - RNA, 20 nt, Artificial Sequence
  synthesized
aagaaagaugacagacacag

SEQ ID NO: 1533 - RNA, 20 nt, Artificial Sequence
  synthesized
aagaugacagacacaggaca

SEQ ID NO: 1534 - RNA, 20 nt, Artificial Sequence
  synthesized
aaugacagacacaggacaua

SEQ ID NO: 1535 - RNA, 20 nt, Artificial Sequence
  synthesized
acuuggaaagaaaaaugaca

SEQ ID NO: 1536 - RNA, 20 nt, Artificial Sequence
  synthesized
acuuggaaagaaagaugaca

SEQ ID NO: 1537 - RNA, 20 nt, Artificial Sequence
  synthesized
agaugacagacacaggacau

SEQ ID NO: 1538 - RNA, 20 nt, Artificial Sequence
  synthesized
aucuuucuuuccaaguagaa

SEQ ID NO: 1539 - RNA, 20 nt, Artificial Sequence
  synthesized
caucuuucuuuccaaguaga

SEQ ID NO: 1540 - RNA, 20 nt, Artificial Sequence
  synthesized
cauuuuucuuuccaaguaga

SEQ ID NO: 1541 - RNA, 20 nt, Artificial Sequence
  synthesized
ccugugucugucaucuuucu

SEQ ID NO: 1542 - RNA, 20 nt, Artificial Sequence
  synthesized
ccugugucugucauuuuucu

SEQ ID NO: 1543 - RNA, 20 nt, Artificial Sequence
  synthesized
cuacuuggaaagaaagauga

SEQ ID NO: 1544 - RNA, 20 nt, Artificial Sequence
  synthesized
cugugucugucaucuuucuu

SEQ ID NO: 1545 - RNA, 20 nt, Artificial Sequence
  synthesized
cugugucugucauuuuucuu

SEQ ID NO: 1546 - RNA, 20 nt, Artificial Sequence
  synthesized
cuuggaaagaaaaaugacag

SEQ ID NO: 1547 - RNA, 20 nt, Artificial Sequence
  synthesized
cuuggaaagaaagaugacag

SEQ ID NO: 1548 - RNA, 20 nt, Artificial Sequence
  synthesized
cuuucuuuccaaguagaaca

SEQ ID NO: 1549 - RNA, 20 nt, Artificial Sequence
  synthesized
gaaaaaugacagacacagga

SEQ ID NO: 1550 - RNA, 20 nt, Artificial Sequence
  synthesized
gaaagaugacagacacagga

SEQ ID NO: 1551 - RNA, 20 nt, Artificial Sequence
  synthesized
gaugacagacacaggacaua

SEQ ID NO: 1552 - RNA, 20 nt, Artificial Sequence
  synthesized
gucugucauuuuucuuucca

SEQ ID NO: 1553 - RNA, 20 nt, Artificial Sequence
  synthesized
gugucugucaucuuucuuuc

SEQ ID NO: 1554 - RNA, 20 nt, Artificial Sequence
  synthesized
gugucugucauuuuucuuuc

SEQ ID NO: 1555 - RNA, 20 nt, Artificial Sequence
  synthesized
uauguccugugucugucauc

SEQ ID NO: 1556 - RNA, 20 nt, Artificial Sequence
  synthesized
uauguccugugucugucauu

SEQ ID NO: 1557 - RNA, 20 nt, Artificial Sequence
  synthesized
ucaucuuucuuuccaaguag

SEQ ID NO: 1558 - RNA, 20 nt, Artificial Sequence
  synthesized
ucauuuuucuuuccaaguag

SEQ ID NO: 1559 - RNA, 20 nt, Artificial Sequence
  synthesized
uccugugucugucauuuuuc

SEQ ID NO: 1560 - RNA, 20 nt, Artificial Sequence
  synthesized
ucugucaucuuucuuuccaa

SEQ ID NO: 1561 - RNA, 20 nt, Artificial Sequence
  synthesized
ucuuucuuuccaaguagaac

SEQ ID NO: 1562 - RNA, 20 nt, Artificial Sequence
  synthesized
uggaaagaaaaaugacagac

SEQ ID NO: 1563 - RNA, 20 nt, Artificial Sequence
  synthesized
uggaaagaaagaugacagac

SEQ ID NO: 1564 - RNA, 20 nt, Artificial Sequence
  synthesized
uguccugugucugucaucuu

SEQ ID NO: 1565 - RNA, 20 nt, Artificial Sequence
  synthesized
ugucugucaucuuucuuucc

SEQ ID NO: 1566 - RNA, 20 nt, Artificial Sequence
  synthesized
ugucugucauuuuucuuucc

SEQ ID NO: 1567 - RNA, 20 nt, Artificial Sequence
  synthesized
uguucuacuuggaaagaaaa

SEQ ID NO: 1568 - RNA, 20 nt, Artificial Sequence
  synthesized
uguucuacuuggaaagaaag

SEQ ID NO: 1569 - RNA, 20 nt, Artificial Sequence
  synthesized
uucuacuuggaaagaaagau

SEQ ID NO: 1570 - RNA, 20 nt, Artificial Sequence
  synthesized
uuggaaagaaaaaugacaga

SEQ ID NO: 1571 - RNA, 20 nt, Artificial Sequence
  synthesized
uuggaaagaaagaugacaga

SEQ ID NO: 1572 - RNA, 20 nt, Artificial Sequence
  synthesized
uuuucuuuccaaguagaaca

SEQ ID NO: 1573 - RNA, 20 nt, Artificial Sequence
  synthesized
uuuuucuuuccaaguagaac

SEQ ID NO: 1574 - RNA, 20 nt, Artificial Sequence
  synthesized
aaaggucuacugggguacca

SEQ ID NO: 1575 - RNA, 20 nt, Artificial Sequence
  synthesized
aaaggucugcugggguacca

SEQ ID NO: 1576 - RNA, 20 nt, Artificial Sequence
  synthesized
acagcgaaaggucuacuggg

SEQ ID NO: 1577 - RNA, 20 nt, Artificial Sequence
  synthesized
acagcgaaaggucugcuggg

SEQ ID NO: 1578 - RNA, 20 nt, Artificial Sequence
  synthesized
accccagcagaccuuucgcu

SEQ ID NO: 1579 - RNA, 20 nt, Artificial Sequence
  synthesized
accccaguagaccuuucgcu

SEQ ID NO: 1580 - RNA, 20 nt, Artificial Sequence
  synthesized
accuugaugguaccccagca

SEQ ID NO: 1581 - RNA, 20 nt, Artificial Sequence
  synthesized
accuugaugguaccccagua

SEQ ID NO: 1582 - RNA, 20 nt, Artificial Sequence
  synthesized
agcgaaaggucuacuggggu

SEQ ID NO: 1583 - RNA, 20 nt, Artificial Sequence
  synthesized
agcgaaaggucugcuggggu

SEQ ID NO: 1584 - RNA, 20 nt, Artificial Sequence
  synthesized
aggucuacugggguaccauc

SEQ ID NO: 1585 - RNA, 20 nt, Artificial Sequence
  synthesized
aggucugcugggguaccauc

SEQ ID NO: 1586 - RNA, 20 nt, Artificial Sequence
  synthesized
augguaccccagcagaccuu

SEQ ID NO: 1587 - RNA, 20 nt, Artificial Sequence
  synthesized
augguaccccaguagaccuu

SEQ ID NO: 1588 - RNA, 20 nt, Artificial Sequence
  synthesized
caaagacagcgaaaggucua

SEQ ID NO: 1589 - RNA, 20 nt, Artificial Sequence
  synthesized
caaagacagcgaaaggucug

SEQ ID NO: 1590 - RNA, 20 nt, Artificial Sequence
  synthesized
cagaccuuucgcugucuuug

SEQ ID NO: 1591 - RNA, 20 nt, Artificial Sequence
  synthesized
cagcagaccuuucgcugucu

SEQ ID NO: 1592 - RNA, 20 nt, Artificial Sequence
  synthesized
caguagaccuuucgcugucu

SEQ ID NO: 1593 - RNA, 20 nt, Artificial Sequence
  synthesized
ccagcagaccuuucgcuguc

SEQ ID NO: 1594 - RNA, 20 nt, Artificial Sequence
  synthesized
ccaguagaccuuucgcuguc

SEQ ID NO: 1595 - RNA, 20 nt, Artificial Sequence
  synthesized
cccagcagaccuuucgcugu

SEQ ID NO: 1596 - RNA, 20 nt, Artificial Sequence
  synthesized
cccaguagaccuuucgcugu

SEQ ID NO: 1597 - RNA, 20 nt, Artificial Sequence
  synthesized
ccccagcagaccuuucgcug

SEQ ID NO: 1598 - RNA, 20 nt, Artificial Sequence
  synthesized
ccccaguagaccuuucgcug

SEQ ID NO: 1599 - RNA, 20 nt, Artificial Sequence
  synthesized
ccuugaugguaccccagcag

SEQ ID NO: 1600 - RNA, 20 nt, Artificial Sequence
  synthesized
ccuugaugguaccccaguag

SEQ ID NO: 1601 - RNA, 20 nt, Artificial Sequence
  synthesized
cgaaaggucuacugggguac

SEQ ID NO: 1602 - RNA, 20 nt, Artificial Sequence
  synthesized
cgaaaggucugcugggguac

SEQ ID NO: 1603 - RNA, 20 nt, Artificial Sequence
  synthesized
cuacugggguaccaucaagg

SEQ ID NO: 1604 - RNA, 20 nt, Artificial Sequence
  synthesized
cugcugggguaccaucaagg

SEQ ID NO: 1605 - RNA, 20 nt, Artificial Sequence
  synthesized
cuugaugguaccccagcaga

SEQ ID NO: 1606 - RNA, 20 nt, Artificial Sequence
  synthesized
cuugaugguaccccaguaga

SEQ ID NO: 1607 - RNA, 20 nt, Artificial Sequence
  synthesized
gaaaggucuacugggguacc

SEQ ID NO: 1608 - RNA, 20 nt, Artificial Sequence
  synthesized
gaaaggucugcugggguacc

SEQ ID NO: 1609 - RNA, 20 nt, Artificial Sequence
  synthesized
gacagcgaaaggucuacugg

SEQ ID NO: 1610 - RNA, 20 nt, Artificial Sequence
  synthesized
gacagcgaaaggucugcugg

SEQ ID NO: 1611 - RNA, 20 nt, Artificial Sequence
  synthesized
gaugguaccccagcagaccu

SEQ ID NO: 1612 - RNA, 20 nt, Artificial Sequence
  synthesized
gaugguaccccaguagaccu

SEQ ID NO: 1613 - RNA, 20 nt, Artificial Sequence
  synthesized
gcagaccuuucgcugucuuu

SEQ ID NO: 1614 - RNA, 20 nt, Artificial Sequence
  synthesized
gcgaaaggucuacuggggua

SEQ ID NO: 1615 - RNA, 20 nt, Artificial Sequence
  synthesized
gcgaaaggucugcuggggua

SEQ ID NO: 1616 - RNA, 20 nt, Artificial Sequence
  synthesized
gguaccccagcagaccuuuc

SEQ ID NO: 1617 - RNA, 20 nt, Artificial Sequence
  synthesized
gguaccccaguagaccuuuc

SEQ ID NO: 1618 - RNA, 20 nt, Artificial Sequence
  synthesized
guaccccagcagaccuuucg

SEQ ID NO: 1619 - RNA, 20 nt, Artificial Sequence
  synthesized
guaccccaguagaccuuucg

SEQ ID NO: 1620 - RNA, 20 nt, Artificial Sequence
  synthesized
guagaccuuucgcugucuuu

SEQ ID NO: 1621 - RNA, 20 nt, Artificial Sequence
  synthesized
uaccccagcagaccuuucgc

SEQ ID NO: 1622 - RNA, 20 nt, Artificial Sequence
  synthesized
uaccccaguagaccuuucgc

SEQ ID NO: 1623 - RNA, 20 nt, Artificial Sequence
  synthesized
uacugggguaccaucaaggu

SEQ ID NO: 1624 - RNA, 20 nt, Artificial Sequence
  synthesized
uagaccuuucgcugucuuug

SEQ ID NO: 1625 - RNA, 20 nt, Artificial Sequence
  synthesized
ucuacugggguaccaucaag

SEQ ID NO: 1626 - RNA, 20 nt, Artificial Sequence
  synthesized
ucugcugggguaccaucaag

SEQ ID NO: 1627 - RNA, 20 nt, Artificial Sequence
  synthesized
ugaugguaccccagcagacc

SEQ ID NO: 1628 - RNA, 20 nt, Artificial Sequence
  synthesized
ugaugguaccccaguagacc

SEQ ID NO: 1629 - RNA, 20 nt, Artificial Sequence
  synthesized
ugcugggguaccaucaaggu

SEQ ID NO: 1630 - RNA, 20 nt, Artificial Sequence
  synthesized
ugguaccccagcagaccuuu

SEQ ID NO: 1631 - RNA, 20 nt, Artificial Sequence
  synthesized
ugguaccccaguagaccuuu

SEQ ID NO: 1632 - RNA, 20 nt, Artificial Sequence
  synthesized
uugaugguaccccagcagac

SEQ ID NO: 1633 - RNA, 20 nt, Artificial Sequence
  synthesized
uugaugguaccccaguagac

SEQ ID NO: 1634 - RNA, 20 nt, Artificial Sequence
  synthesized
aagaugagagaggauggauc

SEQ ID NO: 1635 - RNA, 20 nt, Artificial Sequence
  synthesized
aagaugagaggggauggauc

SEQ ID NO: 1636 - RNA, 20 nt, Artificial Sequence
  synthesized
accauguuuugauccauccc

SEQ ID NO: 1637 - RNA, 20 nt, Artificial Sequence
  synthesized
accauguuuugauccauccu

SEQ ID NO: 1638 - RNA, 20 nt, Artificial Sequence
  synthesized
agagaggauggaucaaaaca

SEQ ID NO: 1639 - RNA, 20 nt, Artificial Sequence
  synthesized
agaggauggaucaaaacaug

SEQ ID NO: 1640 - RNA, 20 nt, Artificial Sequence
  synthesized
agaggggauggaucaaaaca

SEQ ID NO: 1641 - RNA, 20 nt, Artificial Sequence
  synthesized
agaugagagaggauggauca

SEQ ID NO: 1642 - RNA, 20 nt, Artificial Sequence
  synthesized
agaugagaggggauggauca

SEQ ID NO: 1643 - RNA, 20 nt, Artificial Sequence
  synthesized
aggauggaucaaaacauggu

SEQ ID NO: 1644 - RNA, 20 nt, Artificial Sequence
  synthesized
aggggauggaucaaaacaug

SEQ ID NO: 1645 - RNA, 20 nt, Artificial Sequence
  synthesized
auccauccccucucaucuuc

SEQ ID NO: 1646 - RNA, 20 nt, Artificial Sequence
  synthesized
auccauccucucucaucuuc

SEQ ID NO: 1647 - RNA, 20 nt, Artificial Sequence
  synthesized
augagagaggauggaucaaa

SEQ ID NO: 1648 - RNA, 20 nt, Artificial Sequence
  synthesized
augagaggggauggaucaaa

SEQ ID NO: 1649 - RNA, 20 nt, Artificial Sequence
  synthesized
augguugaagaugagagggg

SEQ ID NO: 1650 - RNA, 20 nt, Artificial Sequence
  synthesized
auguuuugauccauccccuc

SEQ ID NO: 1651 - RNA, 20 nt, Artificial Sequence
  synthesized
auguuuugauccauccucuc

SEQ ID NO: 1652 - RNA, 20 nt, Artificial Sequence
  synthesized
cauccccucucaucuucaac

SEQ ID NO: 1653 - RNA, 20 nt, Artificial Sequence
  synthesized
cauccucucucaucuucaac

SEQ ID NO: 1654 - RNA, 20 nt, Artificial Sequence
  synthesized
cauguuuugauccauccccu

SEQ ID NO: 1655 - RNA, 20 nt, Artificial Sequence
  synthesized
cauguuuugauccauccucu

SEQ ID NO: 1656 - RNA, 20 nt, Artificial Sequence
  synthesized
ccauccccucucaucuucaa

SEQ ID NO: 1657 - RNA, 20 nt, Artificial Sequence
  synthesized
ccauguuuugauccaucccc

SEQ ID NO: 1658 - RNA, 20 nt, Artificial Sequence
  synthesized
ccauguuuugauccauccuc

SEQ ID NO: 1659 - RNA, 20 nt, Artificial Sequence
  synthesized
ccccucucaucuucaaccau

SEQ ID NO: 1660 - RNA, 20 nt, Artificial Sequence
  synthesized
cccucucaucuucaaccauc

SEQ ID NO: 1661 - RNA, 20 nt, Artificial Sequence
  synthesized
ccucucaucuucaaccaucc

SEQ ID NO: 1662 - RNA, 20 nt, Artificial Sequence
  synthesized
gaagaugagagaggauggau

SEQ ID NO: 1663 - RNA, 20 nt, Artificial Sequence
  synthesized
gaagaugagaggggauggau

SEQ ID NO: 1664 - RNA, 20 nt, Artificial Sequence
  synthesized
gagagaggauggaucaaaac

SEQ ID NO: 1665 - RNA, 20 nt, Artificial Sequence
  synthesized
gagaggauggaucaaaacau

SEQ ID NO: 1666 - RNA, 20 nt, Artificial Sequence
  synthesized
gagaggggauggaucaaaac

SEQ ID NO: 1667 - RNA, 20 nt, Artificial Sequence
  synthesized
gaggauggaucaaaacaugg

SEQ ID NO: 1668 - RNA, 20 nt, Artificial Sequence
  synthesized
gaggggauggaucaaaacau

SEQ ID NO: 1669 - RNA, 20 nt, Artificial Sequence
  synthesized
gauccauccccucucaucuu

SEQ ID NO: 1670 - RNA, 20 nt, Artificial Sequence
  synthesized
gaugagagaggauggaucaa

SEQ ID NO: 1671 - RNA, 20 nt, Artificial Sequence
  synthesized
gaugagaggggauggaucaa

SEQ ID NO: 1672 - RNA, 20 nt, Artificial Sequence
  synthesized
gaugguugaagaugagagag

SEQ ID NO: 1673 - RNA, 20 nt, Artificial Sequence
  synthesized
gaugguugaagaugagaggg

SEQ ID NO: 1674 - RNA, 20 nt, Artificial Sequence
  synthesized
gggauggaucaaaacauggu

SEQ ID NO: 1675 - RNA, 20 nt, Artificial Sequence
  synthesized
ggggauggaucaaaacaugg

SEQ ID NO: 1676 - RNA, 20 nt, Artificial Sequence
  synthesized
gguugaagaugagagaggau

SEQ ID NO: 1677 - RNA, 20 nt, Artificial Sequence
  synthesized
gguugaagaugagaggggau

SEQ ID NO: 1678 - RNA, 20 nt, Artificial Sequence
  synthesized
guugaagaugagaggggaug

SEQ ID NO: 1679 - RNA, 20 nt, Artificial Sequence
  synthesized
guuuugauccauccccucuc

SEQ ID NO: 1680 - RNA, 20 nt, Artificial Sequence
  synthesized
guuuugauccauccucucuc

SEQ ID NO: 1681 - RNA, 20 nt, Artificial Sequence
  synthesized
uccauccccucucaucuuca

SEQ ID NO: 1682 - RNA, 20 nt, Artificial Sequence
  synthesized
uccauccucucucaucuuca

SEQ ID NO: 1683 - RNA, 20 nt, Artificial Sequence
  synthesized
uccccucucaucuucaacca

SEQ ID NO: 1684 - RNA, 20 nt, Artificial Sequence
  synthesized
ugaagaugagagaggaugga

SEQ ID NO: 1685 - RNA, 20 nt, Artificial Sequence
  synthesized
ugaagaugagaggggaugga

SEQ ID NO: 1686 - RNA, 20 nt, Artificial Sequence
  synthesized
ugagagaggauggaucaaaa

SEQ ID NO: 1687 - RNA, 20 nt, Artificial Sequence
  synthesized
ugagaggggauggaucaaaa

SEQ ID NO: 1688 - RNA, 20 nt, Artificial Sequence
  synthesized
ugauccauccccucucaucu

SEQ ID NO: 1689 - RNA, 20 nt, Artificial Sequence
  synthesized
ugauccauccucucucaucu

SEQ ID NO: 1690 - RNA, 20 nt, Artificial Sequence
  synthesized
ugguugaagaugagagagga

SEQ ID NO: 1691 - RNA, 20 nt, Artificial Sequence
  synthesized
ugguugaagaugagagggga

SEQ ID NO: 1692 - RNA, 20 nt, Artificial Sequence
  synthesized
uguuuugauccauccccucu

SEQ ID NO: 1693 - RNA, 20 nt, Artificial Sequence
  synthesized
uguuuugauccauccucucu

SEQ ID NO: 1694 - RNA, 20 nt, Artificial Sequence
  synthesized
uugaagaugagagaggaugg

SEQ ID NO: 1695 - RNA, 20 nt, Artificial Sequence
  synthesized
uugaagaugagaggggaugg

SEQ ID NO: 1696 - RNA, 20 nt, Artificial Sequence
  synthesized
uugauccauccccucucauc

SEQ ID NO: 1697 - RNA, 20 nt, Artificial Sequence
  synthesized
uugauccauccucucucauc

SEQ ID NO: 1698 - RNA, 20 nt, Artificial Sequence
  synthesized
uuugauccauccccucucau

SEQ ID NO: 1699 - RNA, 20 nt, Artificial Sequence
  synthesized
uuugauccauccucucucau

SEQ ID NO: 1700 - RNA, 20 nt, Artificial Sequence
  synthesized
uuuugauccauccccucuca

SEQ ID NO: 1701 - RNA, 20 nt, Artificial Sequence
  synthesized
uuuugauccauccucucuca

SEQ ID NO: 1702 - RNA, 20 nt, Artificial Sequence
  synthesized
aagaguguuaacgggaaauc

SEQ ID NO: 1703 - RNA, 20 nt, Artificial Sequence
  synthesized
aaugauuucccguuaacacu

SEQ ID NO: 1704 - RNA, 20 nt, Artificial Sequence
  synthesized
augauuucccauuaacacuc

SEQ ID NO: 1705 - RNA, 20 nt, Artificial Sequence
  synthesized
augauuucccguuaacacuc

SEQ ID NO: 1706 - RNA, 20 nt, Artificial Sequence
  synthesized
auuucccguuaacacucuug

SEQ ID NO: 1707 - RNA, 20 nt, Artificial Sequence
  synthesized
caagaguguuaacgggaaau

SEQ ID NO: 1708 - RNA, 20 nt, Artificial Sequence
  synthesized
ccuaaugauuucccguuaac

SEQ ID NO: 1709 - RNA, 20 nt, Artificial Sequence
  synthesized
cuaaugauuucccguuaaca

SEQ ID NO: 1710 - RNA, 20 nt, Artificial Sequence
  synthesized
gaguguuaacgggaaaucau

SEQ ID NO: 1711 - RNA, 20 nt, Artificial Sequence
  synthesized
gauuucccauuaacacucuu

SEQ ID NO: 1712 - RNA, 20 nt, Artificial Sequence
  synthesized
gauuucccguuaacacucuu

SEQ ID NO: 1713 - RNA, 20 nt, Artificial Sequence
  synthesized
uaaugauuucccguuaacac

SEQ ID NO: 1714 - RNA, 20 nt, Artificial Sequence
  synthesized
ucaagaguguuaacgggaaa

SEQ ID NO: 1715 - RNA, 20 nt, Artificial Sequence
  synthesized
ucaagaguguuaaugggaaa

SEQ ID NO: 1716 - RNA, 20 nt, Artificial Sequence
  synthesized
uucaagaguguuaacgggaa

SEQ ID NO: 1717 - RNA, 20 nt, Artificial Sequence
  synthesized
uucaagaguguuaaugggaa

SEQ ID NO: 1718 - RNA, 20 nt, Artificial Sequence
  synthesized
uuucaagaguguuaacggga

SEQ ID NO: 1719 - RNA, 20 nt, Artificial Sequence
  synthesized
uuucaagaguguuaauggga

SEQ ID NO: 1720 - RNA, 20 nt, Artificial Sequence
  synthesized
uuuucaagaguguuaacggg

SEQ ID NO: 1721 - RNA, 20 nt, Artificial Sequence
  synthesized
aaauauucacuaggcaccua

SEQ ID NO: 1722 - RNA, 20 nt, Artificial Sequence
  synthesized
aaguaggugccuagugaaua

SEQ ID NO: 1723 - RNA, 20 nt, Artificial Sequence
  synthesized
aauauucacuaggcaccuac

SEQ ID NO: 1724 - RNA, 20 nt, Artificial Sequence
  synthesized
acaaguaggugccuagugaa

SEQ ID NO: 1725 - RNA, 20 nt, Artificial Sequence
  synthesized
agacaaguaggugccuaaug

SEQ ID NO: 1726 - RNA, 20 nt, Artificial Sequence
  synthesized
agacaaguaggugccuagug

SEQ ID NO: 1727 - RNA, 20 nt, Artificial Sequence
  synthesized
auauucacuaggcaccuacu

SEQ ID NO: 1728 - RNA, 20 nt, Artificial Sequence
  synthesized
auauucauuaggcaccuacu

SEQ ID NO: 1729 - RNA, 20 nt, Artificial Sequence
  synthesized
auucacuaggcaccuacuug

SEQ ID NO: 1730 - RNA, 20 nt, Artificial Sequence
  synthesized
auucauuaggcaccuacuug

SEQ ID NO: 1731 - RNA, 20 nt, Artificial Sequence
  synthesized
caaauauucacuaggcaccu

SEQ ID NO: 1732 - RNA, 20 nt, Artificial Sequence
  synthesized
caaguaggugccuagugaau

SEQ ID NO: 1733 - RNA, 20 nt, Artificial Sequence
  synthesized
cacuaggcaccuacuugucu

SEQ ID NO: 1734 - RNA, 20 nt, Artificial Sequence
  synthesized
cauuaggcaccuacuugucu

SEQ ID NO: 1735 - RNA, 20 nt, Artificial Sequence
  synthesized
cuaggcaccuacuugucuca

SEQ ID NO: 1736 - RNA, 20 nt, Artificial Sequence
  synthesized
gacaaguaggugccuaauga

SEQ ID NO: 1737 - RNA, 20 nt, Artificial Sequence
  synthesized
gacaaguaggugccuaguga

SEQ ID NO: 1738 - RNA, 20 nt, Artificial Sequence
  synthesized
gagacaaguaggugccuaau

SEQ ID NO: 1739 - RNA, 20 nt, Artificial Sequence
  synthesized
gagacaaguaggugccuagu

SEQ ID NO: 1740 - RNA, 20 nt, Artificial Sequence
  synthesized
uauucacuaggcaccuacuu

SEQ ID NO: 1741 - RNA, 20 nt, Artificial Sequence
  synthesized
uauucauuaggcaccuacuu

SEQ ID NO: 1742 - RNA, 20 nt, Artificial Sequence
  synthesized
uuaggcaccuacuugucuca

SEQ ID NO: 1743 - RNA, 20 nt, Artificial Sequence
  synthesized
uucacuaggcaccuacuugu

SEQ ID NO: 1744 - RNA, 20 nt, Artificial Sequence
  synthesized
uucauuaggcaccuacuugu

SEQ ID NO: 1745 - RNA, 20 nt, Artificial Sequence
  synthesized
aagucagaggggcugucacu

SEQ ID NO: 1746 - RNA, 20 nt, Artificial Sequence
  synthesized
acucucggcugagggacuga

SEQ ID NO: 1747 - RNA, 20 nt, Artificial Sequence
  synthesized
agaagucagaggggcuguca

SEQ ID NO: 1748 - RNA, 20 nt, Artificial Sequence
  synthesized
agaagucagaggggcugucc

SEQ ID NO: 1749 - RNA, 20 nt, Artificial Sequence
  synthesized
agagggacagccccucugac

SEQ ID NO: 1750 - RNA, 20 nt, Artificial Sequence
  synthesized
agaggggcugucacucucgg

SEQ ID NO: 1751 - RNA, 20 nt, Artificial Sequence
  synthesized
agaggggcugucccucucgg

SEQ ID NO: 1752 - RNA, 20 nt, Artificial Sequence
  synthesized
agagugacagccccucugac

SEQ ID NO: 1753 - RNA, 20 nt, Artificial Sequence
  synthesized
agccgagagggacagccccu

SEQ ID NO: 1754 - RNA, 20 nt, Artificial Sequence
  synthesized
agccgagagugacagccccu

SEQ ID NO: 1755 - RNA, 20 nt, Artificial Sequence
  synthesized
agggacagccccucugacuu

SEQ ID NO: 1756 - RNA, 20 nt, Artificial Sequence
  synthesized
aggggcugucacucucggcu

SEQ ID NO: 1757 - RNA, 20 nt, Artificial Sequence
  synthesized
aggggcugucccucucggcu

SEQ ID NO: 1758 - RNA, 20 nt, Artificial Sequence
  synthesized
agucagaggggcugucacuc

SEQ ID NO: 1759 - RNA, 20 nt, Artificial Sequence
  synthesized
agucagaggggcugucccuc

SEQ ID NO: 1760 - RNA, 20 nt, Artificial Sequence
  synthesized
agucccucagccgagaggga

SEQ ID NO: 1761 - RNA, 20 nt, Artificial Sequence
  synthesized
agucccucagccgagaguga

SEQ ID NO: 1762 - RNA, 20 nt, Artificial Sequence
  synthesized
agugacagccccucugacuu

SEQ ID NO: 1763 - RNA, 20 nt, Artificial Sequence
  synthesized
cagaggggcugucacucucg

SEQ ID NO: 1764 - RNA, 20 nt, Artificial Sequence
  synthesized
cagaggggcugucccucucg

SEQ ID NO: 1765 - RNA, 20 nt, Artificial Sequence
  synthesized
cagccgagagggacagcccc

SEQ ID NO: 1766 - RNA, 20 nt, Artificial Sequence
  synthesized
cagccgagagugacagcccc

SEQ ID NO: 1767 - RNA, 20 nt, Artificial Sequence
  synthesized
cagucccucagccgagaggg

SEQ ID NO: 1768 - RNA, 20 nt, Artificial Sequence
  synthesized
cagucccucagccgagagug

SEQ ID NO: 1769 - RNA, 20 nt, Artificial Sequence
  synthesized
cccucagccgagagggacag

SEQ ID NO: 1770 - RNA, 20 nt, Artificial Sequence
  synthesized
cccucagccgagagugacag

SEQ ID NO: 1771 - RNA, 20 nt, Artificial Sequence
  synthesized
ccgagagggacagccccucu

SEQ ID NO: 1772 - RNA, 20 nt, Artificial Sequence
  synthesized
ccgagagugacagccccucu

SEQ ID NO: 1773 - RNA, 20 nt, Artificial Sequence
  synthesized
ccucagccgagagggacagc

SEQ ID NO: 1774 - RNA, 20 nt, Artificial Sequence
  synthesized
ccucagccgagagugacagc

SEQ ID NO: 1775 - RNA, 20 nt, Artificial Sequence
  synthesized
ccucucggcugagggacuga

SEQ ID NO: 1776 - RNA, 20 nt, Artificial Sequence
  synthesized
cgagagugacagccccucug

SEQ ID NO: 1777 - RNA, 20 nt, Artificial Sequence
  synthesized
cucagccgagagggacagcc

SEQ ID NO: 1778 - RNA, 20 nt, Artificial Sequence
  synthesized
cucagccgagagugacagcc

SEQ ID NO: 1779 - RNA, 20 nt, Artificial Sequence
  synthesized
cugucacucucggcugaggg

SEQ ID NO: 1780 - RNA, 20 nt, Artificial Sequence
  synthesized
cugucccucucggcugaggg

SEQ ID NO: 1781 - RNA, 20 nt, Artificial Sequence
  synthesized
gaagucagaggggcugucac

SEQ ID NO: 1782 - RNA, 20 nt, Artificial Sequence
  synthesized
gagagugacagccccucuga

SEQ ID NO: 1783 - RNA, 20 nt, Artificial Sequence
  synthesized
gagggacagccccucugacu

SEQ ID NO: 1784 - RNA, 20 nt, Artificial Sequence
  synthesized
gagugacagccccucugacu

SEQ ID NO: 1785 - RNA, 20 nt, Artificial Sequence
  synthesized
gcugucacucucggcugagg

SEQ ID NO: 1786 - RNA, 20 nt, Artificial Sequence
  synthesized
gcugucccucucggcugagg

SEQ ID NO: 1787 - RNA, 20 nt, Artificial Sequence
  synthesized
ggacagccccucugacuucu

SEQ ID NO: 1788 - RNA, 20 nt, Artificial Sequence
  synthesized
gggacagccccucugacuuc

SEQ ID NO: 1789 - RNA, 20 nt, Artificial Sequence
  synthesized
gucccucagccgagagggac

SEQ ID NO: 1790 - RNA, 20 nt, Artificial Sequence
  synthesized
gucccucagccgagagugac

SEQ ID NO: 1791 - RNA, 20 nt, Artificial Sequence
  synthesized
gugacagccccucugacuuc

SEQ ID NO: 1792 - RNA, 20 nt, Artificial Sequence
  synthesized
ucacucucggcugagggacu

SEQ ID NO: 1793 - RNA, 20 nt, Artificial Sequence
  synthesized
ucagaggggcugucacucuc

SEQ ID NO: 1794 - RNA, 20 nt, Artificial Sequence
  synthesized
ucagaggggcugucccucuc

SEQ ID NO: 1795 - RNA, 20 nt, Artificial Sequence
  synthesized
ucagccgagagggacagccc

SEQ ID NO: 1796 - RNA, 20 nt, Artificial Sequence
  synthesized
ucagccgagagugacagccc

SEQ ID NO: 1797 - RNA, 20 nt, Artificial Sequence
  synthesized
ucccucagccgagagggaca

SEQ ID NO: 1798 - RNA, 20 nt, Artificial Sequence
  synthesized
ucccucagccgagagugaca

SEQ ID NO: 1799 - RNA, 20 nt, Artificial Sequence
  synthesized
ucccucucggcugagggacu

SEQ ID NO: 1800 - RNA, 20 nt, Artificial Sequence
  synthesized
ugacagccccucugacuucu

SEQ ID NO: 1801 - RNA, 20 nt, Artificial Sequence
  synthesized
ugucacucucggcugaggga

SEQ ID NO: 1802 - RNA, 20 nt, Artificial Sequence
  synthesized
ugucccucucggcugaggga

SEQ ID NO: 1803 - RNA, 20 nt, Artificial Sequence
  synthesized
aagcagcugcucuguggggc

SEQ ID NO: 1804 - RNA, 20 nt, Artificial Sequence
  synthesized
acagagcagcugcuucuggg

SEQ ID NO: 1805 - RNA, 20 nt, Artificial Sequence
  synthesized
acagaggagcugcuucuggg

SEQ ID NO: 1806 - RNA, 20 nt, Artificial Sequence
  synthesized
acagcugccccacagagcag

SEQ ID NO: 1807 - RNA, 20 nt, Artificial Sequence
  synthesized
acagcugccccacagaggag

SEQ ID NO: 1808 - RNA, 20 nt, Artificial Sequence
  synthesized
agaagcagcugcucuguggg

SEQ ID NO: 1809 - RNA, 20 nt, Artificial Sequence
  synthesized
agagcagcugcuucugggaa

SEQ ID NO: 1810 - RNA, 20 nt, Artificial Sequence
  synthesized
agaggagcugcuucugggaa

SEQ ID NO: 1811 - RNA, 20 nt, Artificial Sequence
  synthesized
agcagcugcucuguggggca

SEQ ID NO: 1812 - RNA, 20 nt, Artificial Sequence
  synthesized
agcugccccacagagcagcu

SEQ ID NO: 1813 - RNA, 20 nt, Artificial Sequence
  synthesized
aggauucccagaagcagcuc

SEQ ID NO: 1814 - RNA, 20 nt, Artificial Sequence
  synthesized
aggauucccagaagcagcug

SEQ ID NO: 1815 - RNA, 20 nt, Artificial Sequence
  synthesized
cacagagcagcugcuucugg

SEQ ID NO: 1816 - RNA, 20 nt, Artificial Sequence
  synthesized
cacagaggagcugcuucugg

SEQ ID NO: 1817 - RNA, 20 nt, Artificial Sequence
  synthesized
cagaagcagcuccucugugg

SEQ ID NO: 1818 - RNA, 20 nt, Artificial Sequence
  synthesized
cagaagcagcugcucugugg

SEQ ID NO: 1819 - RNA, 20 nt, Artificial Sequence
  synthesized
cagagcagcugcuucuggga

SEQ ID NO: 1820 - RNA, 20 nt, Artificial Sequence
  synthesized
cagaggagcugcuucuggga

SEQ ID NO: 1821 - RNA, 20 nt, Artificial Sequence
  synthesized
cagcugccccacagagcagc

SEQ ID NO: 1822 - RNA, 20 nt, Artificial Sequence
  synthesized
accgggcggcgcucacugcc

SEQ ID NO: 1823 - RNA, 20 nt, Artificial Sequence
  synthesized
accgggcugcgcucacugcc

SEQ ID NO: 1824 - RNA, 20 nt, Artificial Sequence
  synthesized
acucgaccgggcggcgcuca

SEQ ID NO: 1825 - RNA, 20 nt, Artificial Sequence
  synthesized
acucgaccgggcugcgcuca

SEQ ID NO: 1826 - RNA, 20 nt, Artificial Sequence
  synthesized
agugagcgcagcccggucga

SEQ ID NO: 1827 - RNA, 20 nt, Artificial Sequence
  synthesized
agugagcgccgcccggucga

SEQ ID NO: 1828 - RNA, 20 nt, Artificial Sequence
  synthesized
cagcccggucgagucccgag

SEQ ID NO: 1829 - RNA, 20 nt, Artificial Sequence
  synthesized
cagugagcgcagcccggucg

SEQ ID NO: 1830 - RNA, 20 nt, Artificial Sequence
  synthesized
cagugagcgccgcccggucg

SEQ ID NO: 1831 - RNA, 20 nt, Artificial Sequence
  synthesized
ccgcccggucgagucccgag

SEQ ID NO: 1832 - RNA, 20 nt, Artificial Sequence
  synthesized
ccggcugggcagugagcgca

SEQ ID NO: 1833 - RNA, 20 nt, Artificial Sequence
  synthesized
ccggcugggcagugagcgcc

SEQ ID NO: 1834 - RNA, 20 nt, Artificial Sequence
  synthesized
ccgggcugcgcucacugccc

SEQ ID NO: 1835 - RNA, 20 nt, Artificial Sequence
  synthesized
ccucgggacucgaccgggcg

SEQ ID NO: 1836 - RNA, 20 nt, Artificial Sequence
  synthesized
ccucgggacucgaccgggcu

SEQ ID NO: 1837 - RNA, 20 nt, Artificial Sequence
  synthesized
cgggacucgaccgggcugcg

SEQ ID NO: 1838 - RNA, 20 nt, Artificial Sequence
  synthesized
cgggcggcgcucacugccca

SEQ ID NO: 1839 - RNA, 20 nt, Artificial Sequence
  synthesized
cgggcugcgcucacugccca

SEQ ID NO: 1840 - RNA, 20 nt, Artificial Sequence
  synthesized
cucgaccgggcggcgcucac

SEQ ID NO: 1841 - RNA, 20 nt, Artificial Sequence
  synthesized
cucgaccgggcugcgcucac

SEQ ID NO: 1842 - RNA, 20 nt, Artificial Sequence
  synthesized
cucgggacucgaccgggcgg

SEQ ID NO: 1843 - RNA, 20 nt, Artificial Sequence
  synthesized
cucgggacucgaccgggcug

SEQ ID NO: 1844 - RNA, 20 nt, Artificial Sequence
  synthesized
cugggcagugagcgcagccc

SEQ ID NO: 1845 - RNA, 20 nt, Artificial Sequence
  synthesized
cugggcagugagcgccgccc

SEQ ID NO: 1846 - RNA, 20 nt, Artificial Sequence
  synthesized
gaccgggcggcgcucacugc

SEQ ID NO: 1847 - RNA, 20 nt, Artificial Sequence
  synthesized
gaccgggcugcgcucacugc

SEQ ID NO: 1848 - RNA, 20 nt, Artificial Sequence
  synthesized
gacucgaccgggcggcgcuc

SEQ ID NO: 1849 - RNA, 20 nt, Artificial Sequence
  synthesized
gacucgaccgggcugcgcuc

SEQ ID NO: 1850 - RNA, 20 nt, Artificial Sequence
  synthesized
gagcgcagcccggucgaguc

SEQ ID NO: 1851 - RNA, 20 nt, Artificial Sequence
  synthesized
gagcgccgcccggucgaguc

SEQ ID NO: 1852 - RNA, 20 nt, Artificial Sequence
  synthesized
gcagugagcgcagcccgguc

SEQ ID NO: 1853 - RNA, 20 nt, Artificial Sequence
  synthesized
gcagugagcgccgcccgguc

SEQ ID NO: 1854 - RNA, 20 nt, Artificial Sequence
  synthesized
gcgcagcccggucgaguccc

SEQ ID NO: 1855 - RNA, 20 nt, Artificial Sequence
  synthesized
ggacucgaccgggcggcgcu

SEQ ID NO: 1856 - RNA, 20 nt, Artificial Sequence
  synthesized
ggacucgaccgggcugcgcu

SEQ ID NO: 1857 - RNA, 20 nt, Artificial Sequence
  synthesized
ggcgcucacugcccagccgg

SEQ ID NO: 1858 - RNA, 20 nt, Artificial Sequence
  synthesized
ggcugggcagugagcgcagc

SEQ ID NO: 1859 - RNA, 20 nt, Artificial Sequence
  synthesized
ggcugggcagugagcgccgc

SEQ ID NO: 1860 - RNA, 20 nt, Artificial Sequence
  synthesized
gggacucgaccgggcugcgc

SEQ ID NO: 1861 - RNA, 20 nt, Artificial Sequence
  synthesized
gggcggcgcucacugcccag

SEQ ID NO: 1862 - RNA, 20 nt, Artificial Sequence
  synthesized
gggcugcgcucacugcccag

SEQ ID NO: 1863 - RNA, 20 nt, Artificial Sequence
  synthesized
gugagcgcagcccggucgag

SEQ ID NO: 1864 - RNA, 20 nt, Artificial Sequence
  synthesized
gugagcgccgcccggucgag

SEQ ID NO: 1865 - RNA, 20 nt, Artificial Sequence
  synthesized
ucgaccgggcggcgcucacu

SEQ ID NO: 1866 - RNA, 20 nt, Artificial Sequence
  synthesized
ucgaccgggcugcgcucacu

SEQ ID NO: 1867 - RNA, 20 nt, Artificial Sequence
  synthesized
ucgggacucgaccgggcggc

SEQ ID NO: 1868 - RNA, 20 nt, Artificial Sequence
  synthesized
ucgggacucgaccgggcugc

SEQ ID NO: 1869 - RNA, 20 nt, Artificial Sequence
  synthesized
ugagcgcagcccggucgagu

SEQ ID NO: 1870 - RNA, 20 nt, Artificial Sequence
  synthesized
ugagcgccgcccggucgagu

SEQ ID NO: 1871 - RNA, 20 nt, Artificial Sequence
  synthesized
ugcgcucacugcccagccgg

SEQ ID NO: 1872 - RNA, 20 nt, Artificial Sequence
  synthesized
ugggcagugagcgcagcccg

SEQ ID NO: 1873 - RNA, 20 nt, Artificial Sequence
  synthesized
ugggcagugagcgccgcccg

SEQ ID NO: 1874 - RNA, 20 nt, Artificial Sequence
  synthesized
ccacagcugccccacagagg

SEQ ID NO: 1875 - RNA, 20 nt, Artificial Sequence
  synthesized
cugccccacagagcagcugc

SEQ ID NO: 1876 - RNA, 20 nt, Artificial Sequence
  synthesized
gaagcagcuccucugugggg

SEQ ID NO: 1877 - RNA, 20 nt, Artificial Sequence
  synthesized
gagcagcugcuucugggaau

SEQ ID NO: 1878 - RNA, 20 nt, Artificial Sequence
  synthesized
gaggagcugcuucugggaau

SEQ ID NO: 1879 - RNA, 20 nt, Artificial Sequence
  synthesized
gauucccagaagcagcuccu

SEQ ID NO: 1880 - RNA, 20 nt, Artificial Sequence
  synthesized
gauucccagaagcagcugcu

SEQ ID NO: 1881 - RNA, 20 nt, Artificial Sequence
  synthesized
gcagcuccucuguggggcag

SEQ ID NO: 1882 - RNA, 20 nt, Artificial Sequence
  synthesized
gcagcugcucuguggggcag

SEQ ID NO: 1883 - RNA, 20 nt, Artificial Sequence
  synthesized
gccccacagagcagcugcuu

SEQ ID NO: 1884 - RNA, 20 nt, Artificial Sequence
  synthesized
gcugccccacagaggagcug

SEQ ID NO: 1885 - RNA, 20 nt, Artificial Sequence
  synthesized
ggagcugcuucugggaaucc

SEQ ID NO: 1886 - RNA, 20 nt, Artificial Sequence
  synthesized
ggauucccagaagcagcucc

SEQ ID NO: 1887 - RNA, 20 nt, Artificial Sequence
  synthesized
ggauucccagaagcagcugc

SEQ ID NO: 1888 - RNA, 20 nt, Artificial Sequence
  synthesized
uccucuguggggcagcugug

SEQ ID NO: 1889 - RNA, 20 nt, Artificial Sequence
  synthesized
ugccccacagagcagcugcu

SEQ ID NO: 1890 - RNA, 20 nt, Artificial Sequence
  synthesized
ugccccacagaggagcugcu

SEQ ID NO: 1891 - RNA, 20 nt, Artificial Sequence
  synthesized
ugcucuguggggcagcugug

SEQ ID NO: 1892 - RNA, 20 nt, Artificial Sequence
  synthesized
uucccagaagcagcuccucu

SEQ ID NO: 1893 - RNA, 20 nt, Artificial Sequence
  synthesized
uucccagaagcagcugcucu

SEQ ID NO: 1894 - RNA, 20 nt, Artificial Sequence
  synthesized
aagagguguaagugugucca

SEQ ID NO: 1895 - RNA, 20 nt, Artificial Sequence
  synthesized
aaguguguccaguuggacug

SEQ ID NO: 1896 - RNA, 20 nt, Artificial Sequence
  synthesized
acacacuuacaccucuuagu

SEQ ID NO: 1897 - RNA, 20 nt, Artificial Sequence
  synthesized
acacuuacaccucuuaguag

SEQ ID NO: 1898 - RNA, 20 nt, Artificial Sequence
  synthesized
acccacuuacaccucuuagu

SEQ ID NO: 1899 - RNA, 20 nt, Artificial Sequence
  synthesized
acuaagagguguaagugugu

SEQ ID NO: 1900 - RNA, 20 nt, Artificial Sequence
  synthesized
acuggacacacuuacaccuc

SEQ ID NO: 1901 - RNA, 20 nt, Artificial Sequence
  synthesized
agagguguaaguguguccag

SEQ ID NO: 1902 - RNA, 20 nt, Artificial Sequence
  synthesized
aguccaacuggacacacuua

SEQ ID NO: 1903 - RNA, 20 nt, Artificial Sequence
  synthesized
aguguguccaguuggacugg

SEQ ID NO: 1904 - RNA, 20 nt, Artificial Sequence
  synthesized
caacuggacacacuuacacc

SEQ ID NO: 1905 - RNA, 20 nt, Artificial Sequence
  synthesized
cacacuuacaccucuuagua

SEQ ID NO: 1906 - RNA, 20 nt, Artificial Sequence
  synthesized
caguccaacuggacacacuu

SEQ ID NO: 1907 - RNA, 20 nt, Artificial Sequence
  synthesized
ccaacuggacacacuuacac

SEQ ID NO: 1908 - RNA, 20 nt, Artificial Sequence
  synthesized
ccaguccaacuggacacacu

SEQ ID NO: 1909 - RNA, 20 nt, Artificial Sequence
  synthesized
cccacuuacaccucuuagua

SEQ ID NO: 1910 - RNA, 20 nt, Artificial Sequence
  synthesized
cuaagagguguaaguguguc

SEQ ID NO: 1911 - RNA, 20 nt, Artificial Sequence
  synthesized
cuacuaagagguguaagugu

SEQ ID NO: 1912 - RNA, 20 nt, Artificial Sequence
  synthesized
cuggacacacuuacaccucu

SEQ ID NO: 1913 - RNA, 20 nt, Artificial Sequence
  synthesized
gacacacuuacaccucuuag

SEQ ID NO: 1914 - RNA, 20 nt, Artificial Sequence
  synthesized
gaccaguccaacuggacaca

SEQ ID NO: 1915 - RNA, 20 nt, Artificial Sequence
  synthesized
ggacacacuuacaccucuua

SEQ ID NO: 1916 - RNA, 20 nt, Artificial Sequence
  synthesized
gguguaaguguguccaguug

SEQ ID NO: 1917 - RNA, 20 nt, Artificial Sequence
  synthesized
guccaacuggacacacuuac

SEQ ID NO: 1918 - RNA, 20 nt, Artificial Sequence
  synthesized
guguguccaguuggacuggu

SEQ ID NO: 1919 - RNA, 20 nt, Artificial Sequence
  synthesized
uaagagguguaagugugucc

SEQ ID NO: 1920 - RNA, 20 nt, Artificial Sequence
  synthesized
uaaguguguccaguuggacu

SEQ ID NO: 1921 - RNA, 20 nt, Artificial Sequence
  synthesized
uacuaagagguguaagugug

SEQ ID NO: 1922 - RNA, 20 nt, Artificial Sequence
  synthesized
uccaacuggacacacuuaca

SEQ ID NO: 1923 - RNA, 20 nt, Artificial Sequence
  synthesized
ugaccaguccaacuggacac

SEQ ID NO: 1924 - RNA, 20 nt, Artificial Sequence
  synthesized
uguaaguguguccaguugga

SEQ ID NO: 1925 - RNA, 20 nt, Artificial Sequence
  synthesized
uguccaguuggacuggucaa

SEQ ID NO: 1926 - RNA, 20 nt, Artificial Sequence
  synthesized
uugaccaguccaacuggaca

SEQ ID NO: 1927 - RNA, 20 nt, Artificial Sequence
  synthesized
acugaagcgagaucgggcca

SEQ ID NO: 1928 - RNA, 20 nt, Artificial Sequence
  synthesized
aguggcccgaucucgcuuca

SEQ ID NO: 1929 - RNA, 20 nt, Artificial Sequence
  synthesized
cacugaagcgagaucgggcc

SEQ ID NO: 1930 - RNA, 20 nt, Artificial Sequence
  synthesized
cccgaucucgcuucagugca

SEQ ID NO: 1931 - RNA, 20 nt, Artificial Sequence
  synthesized
ccgaucucgcuucagugcaa

SEQ ID NO: 1932 - RNA, 20 nt, Artificial Sequence
  synthesized
ccugaucucgcuucagugca

SEQ ID NO: 1933 - RNA, 20 nt, Artificial Sequence
  synthesized
cgaucucgcuucagugcaaa

SEQ ID NO: 1934 - RNA, 20 nt, Artificial Sequence
  synthesized
cugaagcgagaucgggccac

SEQ ID NO: 1935 - RNA, 20 nt, Artificial Sequence
  synthesized
cugaucucgcuucagugcaa

SEQ ID NO: 1936 - RNA, 20 nt, Artificial Sequence
  synthesized
gcacugaagcgagaucgggc

SEQ ID NO: 1937 - RNA, 20 nt, Artificial Sequence
  synthesized
gcaguggcccgaucucgcuu

SEQ ID NO: 1938 - RNA, 20 nt, Artificial Sequence
  synthesized
gcccgaucucgcuucagugc

SEQ ID NO: 1939 - RNA, 20 nt, Artificial Sequence
  synthesized
gccugaucucgcuucagugc

SEQ ID NO: 1940 - RNA, 20 nt, Artificial Sequence
  synthesized
ggcccgaucucgcuucagug

SEQ ID NO: 1941 - RNA, 20 nt, Artificial Sequence
  synthesized
ggccugaucucgcuucagug

SEQ ID NO: 1942 - RNA, 20 nt, Artificial Sequence
  synthesized
guggcccgaucucgcuucag

SEQ ID NO: 1943 - RNA, 20 nt, Artificial Sequence
  synthesized
ugaucucgcuucagugcaaa

SEQ ID NO: 1944 - RNA, 20 nt, Artificial Sequence
  synthesized
ugcacugaagcgagaucggg

SEQ ID NO: 1945 - RNA, 20 nt, Artificial Sequence
  synthesized
ugcaguggcccgaucucgcu

SEQ ID NO: 1946 - RNA, 20 nt, Artificial Sequence
  synthesized
uugcacugaagcgagaucgg

SEQ ID NO: 1947 - RNA, 20 nt, Artificial Sequence
  synthesized
uuugcacugaagcgagauca

SEQ ID NO: 1948 - RNA, 20 nt, Artificial Sequence
  synthesized
uuugcacugaagcgagaucg

SEQ ID NO: 1949 - RNA, 20 nt, Artificial Sequence
  synthesized
aaaagaccccuaccagcugg

SEQ ID NO: 1950 - RNA, 20 nt, Artificial Sequence
  synthesized
aaaagacuccuaccagcugg

SEQ ID NO: 1951 - RNA, 20 nt, Artificial Sequence
  synthesized
aagaccccuaccagcugggc

SEQ ID NO: 1952 - RNA, 20 nt, Artificial Sequence
  synthesized
aagacuccuaccagcugggc

SEQ ID NO: 1953 - RNA, 20 nt, Artificial Sequence
  synthesized
accacgcccagcugguagga

SEQ ID NO: 1954 - RNA, 20 nt, Artificial Sequence
  synthesized
accacgcccagcugguaggg

SEQ ID NO: 1955 - RNA, 20 nt, Artificial Sequence
  synthesized
acgcccagcugguaggaguc

SEQ ID NO: 1956 - RNA, 20 nt, Artificial Sequence
  synthesized
acgcccagcugguagggguc

SEQ ID NO: 1957 - RNA, 20 nt, Artificial Sequence
  synthesized
agcugguaggagucuuuuca

SEQ ID NO: 1958 - RNA, 20 nt, Artificial Sequence
  synthesized
agcugguaggggucuuuuca

SEQ ID NO: 1959 - RNA, 20 nt, Artificial Sequence
  synthesized
aggagucuuuucaaucccuc

SEQ ID NO: 1960 - RNA, 20 nt, Artificial Sequence
  synthesized
agggagggauugaaaagacc

SEQ ID NO: 1961 - RNA, 20 nt, Artificial Sequence
  synthesized
agggagggauugaaaagacu

SEQ ID NO: 1962 - RNA, 20 nt, Artificial Sequence
  synthesized
agggauugaaaagaccccua

SEQ ID NO: 1963 - RNA, 20 nt, Artificial Sequence
  synthesized
agggauugaaaagacuccua

SEQ ID NO: 1964 - RNA, 20 nt, Artificial Sequence
  synthesized
aggggucuuuucaaucccuc

SEQ ID NO: 1965 - RNA, 20 nt, Artificial Sequence
  synthesized
auugaaaagaccccuaccag

SEQ ID NO: 1966 - RNA, 20 nt, Artificial Sequence
  synthesized
auugaaaagacuccuaccag

SEQ ID NO: 1967 - RNA, 20 nt, Artificial Sequence
  synthesized
cacgcccagcugguaggagu

SEQ ID NO: 1968 - RNA, 20 nt, Artificial Sequence
  synthesized
cacgcccagcugguaggggu

SEQ ID NO: 1969 - RNA, 20 nt, Artificial Sequence
  synthesized
cagcugguaggagucuuuuc

SEQ ID NO: 1970 - RNA, 20 nt, Artificial Sequence
  synthesized
cagcugguaggggucuuuuc

SEQ ID NO: 1971 - RNA, 20 nt, Artificial Sequence
  synthesized
ccacgcccagcugguaggag

SEQ ID NO: 1972 - RNA, 20 nt, Artificial Sequence
  synthesized
ccacgcccagcugguagggg

SEQ ID NO: 1973 - RNA, 20 nt, Artificial Sequence
  synthesized
ccagcugguaggagucuuuu

SEQ ID NO: 1974 - RNA, 20 nt, Artificial Sequence
  synthesized
ccagcugguaggggucuuuu

SEQ ID NO: 1975 - RNA, 20 nt, Artificial Sequence
  synthesized
cccagcugguaggagucuuu

SEQ ID NO: 1976 - RNA, 20 nt, Artificial Sequence
  synthesized
cccagcugguaggggucuuu

SEQ ID NO: 1977 - RNA, 20 nt, Artificial Sequence
  synthesized
cgcccagcugguaggagucu

SEQ ID NO: 1978 - RNA, 20 nt, Artificial Sequence
  synthesized
cgcccagcugguaggggucu

SEQ ID NO: 1979 - RNA, 20 nt, Artificial Sequence
  synthesized
cugguaggagucuuuucaau

SEQ ID NO: 1980 - RNA, 20 nt, Artificial Sequence
  synthesized
cugguaggggucuuuucaau

SEQ ID NO: 1981 - RNA, 20 nt, Artificial Sequence
  synthesized
gagggauugaaaagaccccu

SEQ ID NO: 1982 - RNA, 20 nt, Artificial Sequence
  synthesized
gagggauugaaaagacuccu

SEQ ID NO: 1983 - RNA, 20 nt, Artificial Sequence
  synthesized
gagucuuuucaaucccuccc

SEQ ID NO: 1984 - RNA, 20 nt, Artificial Sequence
  synthesized
gauugaaaagaccccuacca

SEQ ID NO: 1985 - RNA, 20 nt, Artificial Sequence
  synthesized
gauugaaaagacuccuacca

SEQ ID NO: 1986 - RNA, 20 nt, Artificial Sequence
  synthesized
gcugguaggagucuuuucaa

SEQ ID NO: 1987 - RNA, 20 nt, Artificial Sequence
  synthesized
gcugguaggggucuuuucaa

SEQ ID NO: 1988 - RNA, 20 nt, Artificial Sequence
  synthesized
ggagggauugaaaagacccc

SEQ ID NO: 1989 - RNA, 20 nt, Artificial Sequence
  synthesized
ggagggauugaaaagacucc

SEQ ID NO: 1990 - RNA, 20 nt, Artificial Sequence
  synthesized
ggagucuuuucaaucccucc

SEQ ID NO: 1991 - RNA, 20 nt, Artificial Sequence
  synthesized
ggauugaaaagaccccuacc

SEQ ID NO: 1992 - RNA, 20 nt, Artificial Sequence
  synthesized
ggauugaaaagacuccuacc

SEQ ID NO: 1993 - RNA, 20 nt, Artificial Sequence
  synthesized
gggagggauugaaaagaccc

SEQ ID NO: 1994 - RNA, 20 nt, Artificial Sequence
  synthesized
gggagggauugaaaagacuc

SEQ ID NO: 1995 - RNA, 20 nt, Artificial Sequence
  synthesized
gggauugaaaagaccccuac

SEQ ID NO: 1996 - RNA, 20 nt, Artificial Sequence
  synthesized
gggauugaaaagacuccuac

SEQ ID NO: 1997 - RNA, 20 nt, Artificial Sequence
  synthesized
ggggucuuuucaaucccucc

SEQ ID NO: 1998 - RNA, 20 nt, Artificial Sequence
  synthesized
gggucuuuucaaucccuccc

SEQ ID NO: 1999 - RNA, 20 nt, Artificial Sequence
  synthesized
gguaggagucuuuucaaucc

SEQ ID NO: 2000 - RNA, 20 nt, Artificial Sequence
  synthesized
gguaggggucuuuucaaucc

SEQ ID NO: 2001 - RNA, 20 nt, Artificial Sequence
  synthesized
ggucuuuucaaucccucccu

SEQ ID NO: 2002 - RNA, 20 nt, Artificial Sequence
  synthesized
guaggagucuuuucaauccc

SEQ ID NO: 2003 - RNA, 20 nt, Artificial Sequence
  synthesized
guaggggucuuuucaauccc

SEQ ID NO: 2004 - RNA, 20 nt, Artificial Sequence
  synthesized
uaggagucuuuucaaucccu

SEQ ID NO: 2005 - RNA, 20 nt, Artificial Sequence
  synthesized
uaggggucuuuucaaucccu

SEQ ID NO: 2006 - RNA, 20 nt, Artificial Sequence
  synthesized
ugguaggagucuuuucaauc

SEQ ID NO: 2007 - RNA, 20 nt, Artificial Sequence
  synthesized
ugguaggggucuuuucaauc

SEQ ID NO: 2008 - RNA, 20 nt, Artificial Sequence
  synthesized
aaccugugggcagggaggga

SEQ ID NO: 2009 - RNA, 20 nt, Artificial Sequence
  synthesized
aacuugugggcagggaggga

SEQ ID NO: 2010 - RNA, 20 nt, Artificial Sequence
  synthesized
aaguugguauuggugccccu

SEQ ID NO: 2011 - RNA, 20 nt, Artificial Sequence
  synthesized
aauaccaaccugugggcagg

SEQ ID NO: 2012 - RNA, 20 nt, Artificial Sequence
  synthesized
aauaccaacuugugggcagg

SEQ ID NO: 2013 - RNA, 20 nt, Artificial Sequence
  synthesized
acaaguugguauuggugccc

SEQ ID NO: 2014 - RNA, 20 nt, Artificial Sequence
  synthesized
acagguugguauuggugccc

SEQ ID NO: 2015 - RNA, 20 nt, Artificial Sequence
  synthesized
accugugggcagggagggac

SEQ ID NO: 2016 - RNA, 20 nt, Artificial Sequence
  synthesized
acuugugggcagggagggac

SEQ ID NO: 2017 - RNA, 20 nt, Artificial Sequence
  synthesized
agguugguauuggugccccu

SEQ ID NO: 2018 - RNA, 20 nt, Artificial Sequence
  synthesized
aguugguauuggugccccuc

SEQ ID NO: 2019 - RNA, 20 nt, Artificial Sequence
  synthesized
caaccugugggcagggaggg

SEQ ID NO: 2020 - RNA, 20 nt, Artificial Sequence
  synthesized
caacuugugggcagggaggg

SEQ ID NO: 2021 - RNA, 20 nt, Artificial Sequence
  synthesized
caaguugguauuggugcccc

SEQ ID NO: 2022 - RNA, 20 nt, Artificial Sequence
  synthesized
cacaaguugguauuggugcc

SEQ ID NO: 2023 - RNA, 20 nt, Artificial Sequence
  synthesized
cacagguugguauuggugcc

SEQ ID NO: 2024 - RNA, 20 nt, Artificial Sequence
  synthesized
caccaauaccaaccuguggg

SEQ ID NO: 2025 - RNA, 20 nt, Artificial Sequence
  synthesized
caccaauaccaacuuguggg

SEQ ID NO: 2026 - RNA, 20 nt, Artificial Sequence
  synthesized
cagguugguauuggugcccc

SEQ ID NO: 2027 - RNA, 20 nt, Artificial Sequence
  synthesized
ccaaccugugggcagggagg

SEQ ID NO: 2028 - RNA, 20 nt, Artificial Sequence
  synthesized
ccaacuugugggcagggagg

SEQ ID NO: 2029 - RNA, 20 nt, Artificial Sequence
  synthesized
ccacaaguugguauuggugc

SEQ ID NO: 2030 - RNA, 20 nt, Artificial Sequence
  synthesized
ccacagguugguauuggugc

SEQ ID NO: 2031 - RNA, 20 nt, Artificial Sequence
  synthesized
cccacaaguugguauuggug

SEQ ID NO: 2032 - RNA, 20 nt, Artificial Sequence
  synthesized
cccacagguugguauuggug

SEQ ID NO: 2033 - RNA, 20 nt, Artificial Sequence
  synthesized
cccucccugcccacaaguug

SEQ ID NO: 2034 - RNA, 20 nt, Artificial Sequence
  synthesized
cccucccugcccacagguug

SEQ ID NO: 2035 - RNA, 20 nt, Artificial Sequence
  synthesized
ccucccugcccacaaguugg

SEQ ID NO: 2036 - RNA, 20 nt, Artificial Sequence
  synthesized
ccucccugcccacagguugg

SEQ ID NO: 2037 - RNA, 20 nt, Artificial Sequence
  synthesized
ccugugggcagggagggaca

SEQ ID NO: 2038 - RNA, 20 nt, Artificial Sequence
  synthesized
cucccugcccacaaguuggu

SEQ ID NO: 2039 - RNA, 20 nt, Artificial Sequence
  synthesized
cucccugcccacagguuggu

SEQ ID NO: 2040 - RNA, 20 nt, Artificial Sequence
  synthesized
cugcccacaaguugguauug

SEQ ID NO: 2041 - RNA, 20 nt, Artificial Sequence
  synthesized
cugcccacagguugguauug

SEQ ID NO: 2042 - RNA, 20 nt, Artificial Sequence
  synthesized
cugugggcagggagggacac

SEQ ID NO: 2043 - RNA, 20 nt, Artificial Sequence
  synthesized
cuugugggcagggagggaca

SEQ ID NO: 2044 - RNA, 20 nt, Artificial Sequence
  synthesized
gcaccaauaccaaccugugg

SEQ ID NO: 2045 - RNA, 20 nt, Artificial Sequence
  synthesized
gcaccaauaccaacuugugg

SEQ ID NO: 2046 - RNA, 20 nt, Artificial Sequence
  synthesized
gcccacaaguugguauuggu

SEQ ID NO: 2047 - RNA, 20 nt, Artificial Sequence
  synthesized
gcccacagguugguauuggu

SEQ ID NO: 2048 - RNA, 20 nt, Artificial Sequence
  synthesized
ggcaccaauaccaaccugug

SEQ ID NO: 2049 - RNA, 20 nt, Artificial Sequence
  synthesized
ggcaccaauaccaacuugug

SEQ ID NO: 2050 - RNA, 20 nt, Artificial Sequence
  synthesized
gguugguauuggugccccuc

SEQ ID NO: 2051 - RNA, 20 nt, Artificial Sequence
  synthesized
ucccucccugcccacaaguu

SEQ ID NO: 2052 - RNA, 20 nt, Artificial Sequence
  synthesized
ucccucccugcccacagguu

SEQ ID NO: 2053 - RNA, 20 nt, Artificial Sequence
  synthesized
ucccugcccacaaguuggua

SEQ ID NO: 2054 - RNA, 20 nt, Artificial Sequence
  synthesized
ucccugcccacagguuggua

SEQ ID NO: 2055 - RNA, 20 nt, Artificial Sequence
  synthesized
ugcccacaaguugguauugg

SEQ ID NO: 2056 - RNA, 20 nt, Artificial Sequence
  synthesized
ugcccacagguugguauugg

SEQ ID NO: 2057 - RNA, 20 nt, Artificial Sequence
  synthesized
ugucccucccugcccacaag

SEQ ID NO: 2058 - RNA, 20 nt, Artificial Sequence
  synthesized
ugucccucccugcccacagg

SEQ ID NO: 2059 - RNA, 20 nt, Artificial Sequence
  synthesized
uugugggcagggagggacac

SEQ ID NO: 2060 - RNA, 20 nt, Artificial Sequence
  synthesized
aaaaaaaacccugccuggcc

SEQ ID NO: 2061 - RNA, 20 nt, Artificial Sequence
  synthesized
aaaaaaacccugccuggccg

SEQ ID NO: 2062 - RNA, 20 nt, Artificial Sequence
  synthesized
aaaaaaacccugccuggcug

SEQ ID NO: 2063 - RNA, 20 nt, Artificial Sequence
  synthesized
aaaaaacccugccuggccgg

SEQ ID NO: 2064 - RNA, 20 nt, Artificial Sequence
  synthesized
aaaaaacccugccuggcugg

SEQ ID NO: 2065 - RNA, 20 nt, Artificial Sequence
  synthesized
aacccugccuggccggcaag

SEQ ID NO: 2066 - RNA, 20 nt, Artificial Sequence
  synthesized
aaggagauccuugccagcca

SEQ ID NO: 2067 - RNA, 20 nt, Artificial Sequence
  synthesized
aaggagauccuugccggcca

SEQ ID NO: 2068 - RNA, 20 nt, Artificial Sequence
  synthesized
acaaggagauccuugccggc

SEQ ID NO: 2069 - RNA, 20 nt, Artificial Sequence
  synthesized
acccugccuggccggcaagg

SEQ ID NO: 2070 - RNA, 20 nt, Artificial Sequence
  synthesized
aggagauccuugccagccag

SEQ ID NO: 2071 - RNA, 20 nt, Artificial Sequence
  synthesized
aggagauccuugccggccag

SEQ ID NO: 2072 - RNA, 20 nt, Artificial Sequence
  synthesized
auccuugccggccaggcagg

SEQ ID NO: 2073 - RNA, 20 nt, Artificial Sequence
  synthesized
ccagccaggcaggguuuuuu

SEQ ID NO: 2074 - RNA, 20 nt, Artificial Sequence
  synthesized
cccugccuggccggcaagga

SEQ ID NO: 2075 - RNA, 20 nt, Artificial Sequence
  synthesized
ccggcaaggaucuccuuguc

SEQ ID NO: 2076 - RNA, 20 nt, Artificial Sequence
  synthesized
ccggccaggcaggguuuuuu

SEQ ID NO: 2077 - RNA, 20 nt, Artificial Sequence
  synthesized
ccugccuggccggcaaggau

SEQ ID NO: 2078 - RNA, 20 nt, Artificial Sequence
  synthesized
ccugccuggcuggcaaggau

SEQ ID NO: 2079 - RNA, 20 nt, Artificial Sequence
  synthesized
ccuggccggcaaggaucucc

SEQ ID NO: 2080 - RNA, 20 nt, Artificial Sequence
  synthesized
ccuugccagccaggcagggu

SEQ ID NO: 2081 - RNA, 20 nt, Artificial Sequence
  synthesized
ccuugccggccaggcagggu

SEQ ID NO: 2082 - RNA, 20 nt, Artificial Sequence
  synthesized
cggccaggcaggguuuuuuu

SEQ ID NO: 2083 - RNA, 20 nt, Artificial Sequence
  synthesized
cugccuggccggcaaggauc

SEQ ID NO: 2084 - RNA, 20 nt, Artificial Sequence
  synthesized
cugccuggcuggcaaggauc

SEQ ID NO: 2085 - RNA, 20 nt, Artificial Sequence
  synthesized
cuggcaaggaucuccuuguc

SEQ ID NO: 2086 - RNA, 20 nt, Artificial Sequence
  synthesized
cuggccggcaaggaucuccu

SEQ ID NO: 2087 - RNA, 20 nt, Artificial Sequence
  synthesized
cuggcuggcaaggaucuccu

SEQ ID NO: 2088 - RNA, 20 nt, Artificial Sequence
  synthesized
cuugccagccaggcaggguu

SEQ ID NO: 2089 - RNA, 20 nt, Artificial Sequence
  synthesized
cuugccggccaggcaggguu

SEQ ID NO: 2090 - RNA, 20 nt, Artificial Sequence
  synthesized
gauccuugccggccaggcag

SEQ ID NO: 2091 - RNA, 20 nt, Artificial Sequence
  synthesized
gccagccaggcaggguuuuu

SEQ ID NO: 2092 - RNA, 20 nt, Artificial Sequence
  synthesized
gccggcaaggaucuccuugu

SEQ ID NO: 2093 - RNA, 20 nt, Artificial Sequence
  synthesized
gccggccaggcaggguuuuu

SEQ ID NO: 2094 - RNA, 20 nt, Artificial Sequence
  synthesized
gccuggccggcaaggaucuc

SEQ ID NO: 2095 - RNA, 20 nt, Artificial Sequence
  synthesized
gccuggcuggcaaggaucuc

SEQ ID NO: 2096 - RNA, 20 nt, Artificial Sequence
  synthesized
gcuggcaaggaucuccuugu

SEQ ID NO: 2097 - RNA, 20 nt, Artificial Sequence
  synthesized
ggacaaggagauccuugcca

SEQ ID NO: 2098 - RNA, 20 nt, Artificial Sequence
  synthesized
ggacaaggagauccuugccg

SEQ ID NO: 2099 - RNA, 20 nt, Artificial Sequence
  synthesized
ggagauccuugccagccagg

SEQ ID NO: 2100 - RNA, 20 nt, Artificial Sequence
  synthesized
ggagauccuugccggccagg

SEQ ID NO: 2101 - RNA, 20 nt, Artificial Sequence
  synthesized
ggccggcaaggaucuccuug

SEQ ID NO: 2102 - RNA, 20 nt, Artificial Sequence
  synthesized
ggcuggcaaggaucuccuug

SEQ ID NO: 2103 - RNA, 20 nt, Artificial Sequence
  synthesized
uccuugccagccaggcaggg

SEQ ID NO: 2104 - RNA, 20 nt, Artificial Sequence
  synthesized
uccuugccggccaggcaggg

SEQ ID NO: 2105 - RNA, 20 nt, Artificial Sequence
  synthesized
ugccggccaggcaggguuuu

SEQ ID NO: 2106 - RNA, 20 nt, Artificial Sequence
  synthesized
ugccuggccggcaaggaucu

SEQ ID NO: 2107 - RNA, 20 nt, Artificial Sequence
  synthesized
ugccuggcuggcaaggaucu

SEQ ID NO: 2108 - RNA, 20 nt, Artificial Sequence
  synthesized
uggccggcaaggaucuccuu

SEQ ID NO: 2109 - RNA, 20 nt, Artificial Sequence
  synthesized
uggcuggcaaggaucuccuu

SEQ ID NO: 2110 - RNA, 20 nt, Artificial Sequence
  synthesized
uugccagccaggcaggguuu

SEQ ID NO: 2111 - RNA, 20 nt, Artificial Sequence
  synthesized
uugccggccaggcaggguuu

SEQ ID NO: 2112 - RNA, 20 nt, Artificial Sequence
  synthesized
aaaggugauugaacaccuag

SEQ ID NO: 2113 - RNA, 20 nt, Artificial Sequence
  synthesized
aacggugauugaacaccuag

SEQ ID NO: 2114 - RNA, 20 nt, Artificial Sequence
  synthesized
aaggugauugaacaccuagc

SEQ ID NO: 2115 - RNA, 20 nt, Artificial Sequence
  synthesized
aaucaccuuucacaaugaua

SEQ ID NO: 2116 - RNA, 20 nt, Artificial Sequence
  synthesized
accuuucacaaugauaacag

SEQ ID NO: 2117 - RNA, 20 nt, Artificial Sequence
  synthesized
acggugauugaacaccuagc

SEQ ID NO: 2118 - RNA, 20 nt, Artificial Sequence
  synthesized
agguguucaaucaccuuuca

SEQ ID NO: 2119 - RNA, 20 nt, Artificial Sequence
  synthesized
aucaccuuucacaaugauaa

SEQ ID NO: 2120 - RNA, 20 nt, Artificial Sequence
  synthesized
aucauugugaaaggugauug

SEQ ID NO: 2121 - RNA, 20 nt, Artificial Sequence
  synthesized
auugugaaaggugauugaac

SEQ ID NO: 2122 - RNA, 20 nt, Artificial Sequence
  synthesized
caccuuucacaaugauaaca

SEQ ID NO: 2123 - RNA, 20 nt, Artificial Sequence
  synthesized
cauugugaaaggugauugaa

SEQ ID NO: 2124 - RNA, 20 nt, Artificial Sequence
  synthesized
cggugauugaacaccuagca

SEQ ID NO: 2125 - RNA, 20 nt, Artificial Sequence
  synthesized
cuagguguucaaucaccguu

SEQ ID NO: 2126 - RNA, 20 nt, Artificial Sequence
  synthesized
cuagguguucaaucaccuuu

SEQ ID NO: 2127 - RNA, 20 nt, Artificial Sequence
  synthesized
cuguuaucauugugaaaggu

SEQ ID NO: 2128 - RNA, 20 nt, Artificial Sequence
  synthesized
gaaaggugauugaacaccua

SEQ ID NO: 2129 - RNA, 20 nt, Artificial Sequence
  synthesized
gaacggugauugaacaccua

SEQ ID NO: 2130 - RNA, 20 nt, Artificial Sequence
  synthesized
gcuagguguucaaucaccgu

SEQ ID NO: 2131 - RNA, 20 nt, Artificial Sequence
  synthesized
gcuagguguucaaucaccuu

SEQ ID NO: 2132 - RNA, 20 nt, Artificial Sequence
  synthesized
gugaaaggugauugaacacc

SEQ ID NO: 2133 - RNA, 20 nt, Artificial Sequence
  synthesized
gugaacggugauugaacacc

SEQ ID NO: 2134 - RNA, 20 nt, Artificial Sequence
  synthesized
guguucaaucaccuuucaca

SEQ ID NO: 2135 - RNA, 20 nt, Artificial Sequence
  synthesized
uacuguuaucauugugaaag

SEQ ID NO: 2136 - RNA, 20 nt, Artificial Sequence
  synthesized
uagguguucaaucaccguuc

SEQ ID NO: 2137 - RNA, 20 nt, Artificial Sequence
  synthesized
uagguguucaaucaccuuuc

SEQ ID NO: 2138 - RNA, 20 nt, Artificial Sequence
  synthesized
ucaaucaccuuucacaauga

SEQ ID NO: 2139 - RNA, 20 nt, Artificial Sequence
  synthesized
ucaccuuucacaaugauaac

SEQ ID NO: 2140 - RNA, 20 nt, Artificial Sequence
  synthesized
ucauugugaaaggugauuga

SEQ ID NO: 2141 - RNA, 20 nt, Artificial Sequence
  synthesized
ugaaaggugauugaacaccu

SEQ ID NO: 2142 - RNA, 20 nt, Artificial Sequence
  synthesized
ugaacggugauugaacaccu

SEQ ID NO: 2143 - RNA, 20 nt, Artificial Sequence
  synthesized
ugcuagguguucaaucaccg

SEQ ID NO: 2144 - RNA, 20 nt, Artificial Sequence
  synthesized
ugcuagguguucaaucaccu

SEQ ID NO: 2145 - RNA, 20 nt, Artificial Sequence
  synthesized
ugugaaaggugauugaacac

SEQ ID NO: 2146 - RNA, 20 nt, Artificial Sequence
  synthesized
ugugaacggugauugaacac

SEQ ID NO: 2147 - RNA, 20 nt, Artificial Sequence
  synthesized
uguuaucauugugaaaggug

SEQ ID NO: 2148 - RNA, 20 nt, Artificial Sequence
  synthesized
uucaaucaccuuucacaaug

SEQ ID NO: 2149 - RNA, 20 nt, Artificial Sequence
  synthesized
aacacuaggaugggccacgg

SEQ ID NO: 2150 - RNA, 20 nt, Artificial Sequence
  synthesized
aacacuagggugggccacgg

SEQ ID NO: 2151 - RNA, 20 nt, Artificial Sequence
  synthesized
acccuaguguugguagcugc

SEQ ID NO: 2152 - RNA, 20 nt, Artificial Sequence
  synthesized
acuaggaugggccacgguca

SEQ ID NO: 2153 - RNA, 20 nt, Artificial Sequence
  synthesized
acuagggugggccacgguca

SEQ ID NO: 2154 - RNA, 20 nt, Artificial Sequence
  synthesized
agcuaccaacacuaggaugg

SEQ ID NO: 2155 - RNA, 20 nt, Artificial Sequence
  synthesized
agcuaccaacacuagggugg

SEQ ID NO: 2156 - RNA, 20 nt, Artificial Sequence
  synthesized
aggaugggccacggucacag

SEQ ID NO: 2157 - RNA, 20 nt, Artificial Sequence
  synthesized
agggugggccacggucacag

SEQ ID NO: 2158 - RNA, 20 nt, Artificial Sequence
  synthesized
auccuaguguugguagcugc

SEQ ID NO: 2159 - RNA, 20 nt, Artificial Sequence
  synthesized
augggccacggucacagcaa

SEQ ID NO: 2160 - RNA, 20 nt, Artificial Sequence
  synthesized
caacacuaggaugggccacg

SEQ ID NO: 2161 - RNA, 20 nt, Artificial Sequence
  synthesized
caacacuagggugggccacg

SEQ ID NO: 2162 - RNA, 20 nt, Artificial Sequence
  synthesized
cacccuaguguugguagcug

SEQ ID NO: 2163 - RNA, 20 nt, Artificial Sequence
  synthesized
cacuaggaugggccacgguc

SEQ ID NO: 2164 - RNA, 20 nt, Artificial Sequence
  synthesized
cacuagggugggccacgguc

SEQ ID NO: 2165 - RNA, 20 nt, Artificial Sequence
  synthesized
cagcuaccaacacuaggaug

SEQ ID NO: 2166 - RNA, 20 nt, Artificial Sequence
  synthesized
cagcuaccaacacuagggug

SEQ ID NO: 2167 - RNA, 20 nt, Artificial Sequence
  synthesized
cauccuaguguugguagcug

SEQ ID NO: 2168 - RNA, 20 nt, Artificial Sequence
  synthesized
ccacccuaguguugguagcu

SEQ ID NO: 2169 - RNA, 20 nt, Artificial Sequence
  synthesized
ccauccuaguguugguagcu

SEQ ID NO: 2170 - RNA, 20 nt, Artificial Sequence
  synthesized
cccacccuaguguugguagc

SEQ ID NO: 2171 - RNA, 20 nt, Artificial Sequence
  synthesized
cccauccuaguguugguagc

SEQ ID NO: 2172 - RNA, 20 nt, Artificial Sequence
  synthesized
cccuaguguugguagcugcc

SEQ ID NO: 2173 - RNA, 20 nt, Artificial Sequence
  synthesized
ccguggcccacccuaguguu

SEQ ID NO: 2174 - RNA, 20 nt, Artificial Sequence
  synthesized
ccguggcccauccuaguguu

SEQ ID NO: 2175 - RNA, 20 nt, Artificial Sequence
  synthesized
cguggcccacccuaguguug

SEQ ID NO: 2176 - RNA, 20 nt, Artificial Sequence
  synthesized
cguggcccauccuaguguug

SEQ ID NO: 2177 - RNA, 20 nt, Artificial Sequence
  synthesized
cuaggaugggccacggucac

SEQ ID NO: 2178 - RNA, 20 nt, Artificial Sequence
  synthesized
cuagggugggccacggucac

SEQ ID NO: 2179 - RNA, 20 nt, Artificial Sequence
  synthesized
gaccguggcccacccuagug

SEQ ID NO: 2180 - RNA, 20 nt, Artificial Sequence
  synthesized
gaccguggcccauccuagug

SEQ ID NO: 2181 - RNA, 20 nt, Artificial Sequence
  synthesized
gaugggccacggucacagca

SEQ ID NO: 2182 - RNA, 20 nt, Artificial Sequence
  synthesized
gcccacccuaguguugguag

SEQ ID NO: 2183 - RNA, 20 nt, Artificial Sequence
  synthesized
gcccauccuaguguugguag

SEQ ID NO: 2184 - RNA, 20 nt, Artificial Sequence
  synthesized
gcuaccaacacuaggauggg

SEQ ID NO: 2185 - RNA, 20 nt, Artificial Sequence
  synthesized
gcuaccaacacuaggguggg

SEQ ID NO: 2186 - RNA, 20 nt, Artificial Sequence
  synthesized
gcugugaccguggcccaccc

SEQ ID NO: 2187 - RNA, 20 nt, Artificial Sequence
  synthesized
gcugugaccguggcccaucc

SEQ ID NO: 2188 - RNA, 20 nt, Artificial Sequence
  synthesized
ggaugggccacggucacagc

SEQ ID NO: 2189 - RNA, 20 nt, Artificial Sequence
  synthesized
ggcccacccuaguguuggua

SEQ ID NO: 2190 - RNA, 20 nt, Artificial Sequence
  synthesized
ggcccauccuaguguuggua

SEQ ID NO: 2191 - RNA, 20 nt, Artificial Sequence
  synthesized
gggugggccacggucacagc

SEQ ID NO: 2192 - RNA, 20 nt, Artificial Sequence
  synthesized
ggugggccacggucacagca

SEQ ID NO: 2193 - RNA, 20 nt, Artificial Sequence
  synthesized
gugaccguggcccacccuag

SEQ ID NO: 2194 - RNA, 20 nt, Artificial Sequence
  synthesized
gugaccguggcccauccuag

SEQ ID NO: 2195 - RNA, 20 nt, Artificial Sequence
  synthesized
guggcccacccuaguguugg

SEQ ID NO: 2196 - RNA, 20 nt, Artificial Sequence
  synthesized
guggcccauccuaguguugg

SEQ ID NO: 2197 - RNA, 20 nt, Artificial Sequence
  synthesized
gugggccacggucacagcaa

SEQ ID NO: 2198 - RNA, 20 nt, Artificial Sequence
  synthesized
uaccaacacuaggaugggcc

SEQ ID NO: 2199 - RNA, 20 nt, Artificial Sequence
  synthesized
uaccaacacuagggugggcc

SEQ ID NO: 2200 - RNA, 20 nt, Artificial Sequence
  synthesized
uaggaugggccacggucaca

SEQ ID NO: 2201 - RNA, 20 nt, Artificial Sequence
  synthesized
uagggugggccacggucaca

SEQ ID NO: 2202 - RNA, 20 nt, Artificial Sequence
  synthesized
uccuaguguugguagcugcc

SEQ ID NO: 2203 - RNA, 20 nt, Artificial Sequence
  synthesized
ugcugugaccguggcccacc

SEQ ID NO: 2204 - RNA, 20 nt, Artificial Sequence
  synthesized
ugcugugaccguggcccauc

SEQ ID NO: 2205 - RNA, 20 nt, Artificial Sequence
  synthesized
uggcccacccuaguguuggu

SEQ ID NO: 2206 - RNA, 20 nt, Artificial Sequence
  synthesized
uggcccauccuaguguuggu

SEQ ID NO: 2207 - RNA, 20 nt, Artificial Sequence
  synthesized
ugugaccguggcccacccua

SEQ ID NO: 2208 - RNA, 20 nt, Artificial Sequence
  synthesized
ugugaccguggcccauccua

SEQ ID NO: 2209 - RNA, 20 nt, Artificial Sequence
  synthesized
uugcugugaccguggcccac

SEQ ID NO: 2210 - RNA, 20 nt, Artificial Sequence
  synthesized
uugcugugaccguggcccau

SEQ ID NO: 2211 - RNA, 20 nt, Artificial Sequence
  synthesized
accugcccaauccccagcac

SEQ ID NO: 2212 - RNA, 20 nt, Artificial Sequence
  synthesized
agcccucaccugcccaaucc

SEQ ID NO: 2213 - RNA, 20 nt, Artificial Sequence
  synthesized
agcccucgccugcccaaucc

SEQ ID NO: 2214 - RNA, 20 nt, Artificial Sequence
  synthesized
agcuuccagcccucaccugc

SEQ ID NO: 2215 - RNA, 20 nt, Artificial Sequence
  synthesized
agcuuccagcccucgccugc

SEQ ID NO: 2216 - RNA, 20 nt, Artificial Sequence
  synthesized
auugggcaggcgagggcugg

SEQ ID NO: 2217 - RNA, 20 nt, Artificial Sequence
  synthesized
caccugcccaauccccagca

SEQ ID NO: 2218 - RNA, 20 nt, Artificial Sequence
  synthesized
ccagcccucgccugcccaau

SEQ ID NO: 2219 - RNA, 20 nt, Artificial Sequence
  synthesized
ccagcuuccagcccucgccu

SEQ ID NO: 2220 - RNA, 20 nt, Artificial Sequence
  synthesized
cccagcuuccagcccucacc

SEQ ID NO: 2221 - RNA, 20 nt, Artificial Sequence
  synthesized
cccagcuuccagcccucgcc

SEQ ID NO: 2222 - RNA, 20 nt, Artificial Sequence
  synthesized
ccccagcuuccagcccucac

SEQ ID NO: 2223 - RNA, 20 nt, Artificial Sequence
  synthesized
ccccagcuuccagcccucgc

SEQ ID NO: 2224 - RNA, 20 nt, Artificial Sequence
  synthesized
cccccagcuuccagcccuca

SEQ ID NO: 2225 - RNA, 20 nt, Artificial Sequence
  synthesized
cccccagcuuccagcccucg

SEQ ID NO: 2226 - RNA, 20 nt, Artificial Sequence
  synthesized
cccucaccugcccaaucccc

SEQ ID NO: 2227 - RNA, 20 nt, Artificial Sequence
  synthesized
cccucgccugcccaaucccc

SEQ ID NO: 2228 - RNA, 20 nt, Artificial Sequence
  synthesized
ccucgccugcccaaucccca

SEQ ID NO: 2229 - RNA, 20 nt, Artificial Sequence
  synthesized
cgccugcccaauccccagca

SEQ ID NO: 2230 - RNA, 20 nt, Artificial Sequence
  synthesized
cucaccugcccaauccccag

SEQ ID NO: 2231 - RNA, 20 nt, Artificial Sequence
  synthesized
cucgccugcccaauccccag

SEQ ID NO: 2232 - RNA, 20 nt, Artificial Sequence
  synthesized
cuggggauugggcaggcgag

SEQ ID NO: 2233 - RNA, 20 nt, Artificial Sequence
  synthesized
cuggggauugggcaggugag

SEQ ID NO: 2234 - RNA, 20 nt, Artificial Sequence
  synthesized
cuuccagcccucgccugccc

SEQ ID NO: 2235 - RNA, 20 nt, Artificial Sequence
  synthesized
gauugggcaggcgagggcug

SEQ ID NO: 2236 - RNA, 20 nt, Artificial Sequence
  synthesized
gccugcccaauccccagcac

SEQ ID NO: 2237 - RNA, 20 nt, Artificial Sequence
  synthesized
gcuuccagcccucgccugcc

SEQ ID NO: 2238 - RNA, 20 nt, Artificial Sequence
  synthesized
gggcaggcgagggcuggaag

SEQ ID NO: 2239 - RNA, 20 nt, Artificial Sequence
  synthesized
ggggauugggcaggcgaggg

SEQ ID NO: 2240 - RNA, 20 nt, Artificial Sequence
  synthesized
gugcuggggauugggcaggc

SEQ ID NO: 2241 - RNA, 20 nt, Artificial Sequence
  synthesized
ucaccugcccaauccccagc

SEQ ID NO: 2242 - RNA, 20 nt, Artificial Sequence
  synthesized
uccagcccucgccugcccaa

SEQ ID NO: 2243 - RNA, 20 nt, Artificial Sequence
  synthesized
ucgccugcccaauccccagc

SEQ ID NO: 2244 - RNA, 20 nt, Artificial Sequence
  synthesized
ugggcaggcgagggcuggaa

SEQ ID NO: 2245 - RNA, 20 nt, Artificial Sequence
  synthesized
ugggcaggugagggcuggaa

SEQ ID NO: 2246 - RNA, 20 nt, Artificial Sequence
  synthesized
uggggauugggcaggcgagg

SEQ ID NO: 2247 - RNA, 20 nt, Artificial Sequence
  synthesized
uuccagcccucgccugccca

SEQ ID NO: 2248 - RNA, 20 nt, Artificial Sequence
  synthesized
uugggcaggcgagggcugga

SEQ ID NO: 2249 - RNA, 20 nt, Artificial Sequence
  synthesized
uugggcaggugagggcugga

SEQ ID NO: 2250 - RNA, 20 nt, Artificial Sequence
  synthesized
aaauaucuuggggacuggga

SEQ ID NO: 2251 - RNA, 20 nt, Artificial Sequence
  synthesized
aaaugucuuggggacuggga

SEQ ID NO: 2252 - RNA, 20 nt, Artificial Sequence
  synthesized
aagacauuugugcagacuuu

SEQ ID NO: 2253 - RNA, 20 nt, Artificial Sequence
  synthesized
aagauauuugugcagacuuu

SEQ ID NO: 2254 - RNA, 20 nt, Artificial Sequence
  synthesized
aauaucuuggggacugggau

SEQ ID NO: 2255 - RNA, 20 nt, Artificial Sequence
  synthesized
aaugucuuggggacugggau

SEQ ID NO: 2256 - RNA, 20 nt, Artificial Sequence
  synthesized
acaaauaucuuggggacugg

SEQ ID NO: 2257 - RNA, 20 nt, Artificial Sequence
  synthesized
acaaaugucuuggggacugg

SEQ ID NO: 2258 - RNA, 20 nt, Artificial Sequence
  synthesized
agacauuugugcagacuuug

SEQ ID NO: 2259 - RNA, 20 nt, Artificial Sequence
  synthesized
agauauuugugcagacuuug

SEQ ID NO: 2260 - RNA, 20 nt, Artificial Sequence
  synthesized
agcaaagucugcacaaauau

SEQ ID NO: 2261 - RNA, 20 nt, Artificial Sequence
  synthesized
agcaaagucugcacaaaugu

SEQ ID NO: 2262 - RNA, 20 nt, Artificial Sequence
  synthesized
auaucuuggggacugggauc

SEQ ID NO: 2263 - RNA, 20 nt, Artificial Sequence
  synthesized
auauuugugcagacuuugcu

SEQ ID NO: 2264 - RNA, 20 nt, Artificial Sequence
  synthesized
aucuuggggacugggaucca

SEQ ID NO: 2265 - RNA, 20 nt, Artificial Sequence
  synthesized
augucuuggggacugggauc

SEQ ID NO: 2266 - RNA, 20 nt, Artificial Sequence
  synthesized
caaauaucuuggggacuggg

SEQ ID NO: 2267 - RNA, 20 nt, Artificial Sequence
  synthesized
caaaugucuuggggacuggg

SEQ ID NO: 2268 - RNA, 20 nt, Artificial Sequence
  synthesized
caagacauuugugcagacuu

SEQ ID NO: 2269 - RNA, 20 nt, Artificial Sequence
  synthesized
caagauauuugugcagacuu

SEQ ID NO: 2270 - RNA, 20 nt, Artificial Sequence
  synthesized
caguccccaagacauuugug

SEQ ID NO: 2271 - RNA, 20 nt, Artificial Sequence
  synthesized
caguccccaagauauuugug

SEQ ID NO: 2272 - RNA, 20 nt, Artificial Sequence
  synthesized
cauuugugcagacuuugcua

SEQ ID NO: 2273 - RNA, 20 nt, Artificial Sequence
  synthesized
ccaagacauuugugcagacu

SEQ ID NO: 2274 - RNA, 20 nt, Artificial Sequence
  synthesized
ccaagauauuugugcagacu

SEQ ID NO: 2275 - RNA, 20 nt, Artificial Sequence
  synthesized
ccaguccccaagacauuugu

SEQ ID NO: 2276 - RNA, 20 nt, Artificial Sequence
  synthesized
ccaguccccaagauauuugu

SEQ ID NO: 2277 - RNA, 20 nt, Artificial Sequence
  synthesized
cccaagacauuugugcagac

SEQ ID NO: 2278 - RNA, 20 nt, Artificial Sequence
  synthesized
cccaagauauuugugcagac

SEQ ID NO: 2279 - RNA, 20 nt, Artificial Sequence
  synthesized
cccaguccccaagacauuug

SEQ ID NO: 2280 - RNA, 20 nt, Artificial Sequence
  synthesized
cccaguccccaagauauuug

SEQ ID NO: 2281 - RNA, 20 nt, Artificial Sequence
  synthesized
ccccaagacauuugugcaga

SEQ ID NO: 2282 - RNA, 20 nt, Artificial Sequence
  synthesized
ccccaagauauuugugcaga

SEQ ID NO: 2283 - RNA, 20 nt, Artificial Sequence
  synthesized
cugcacaaauaucuugggga

SEQ ID NO: 2284 - RNA, 20 nt, Artificial Sequence
  synthesized
cugcacaaaugucuugggga

SEQ ID NO: 2285 - RNA, 20 nt, Artificial Sequence
  synthesized
gacauuugugcagacuuugc

SEQ ID NO: 2286 - RNA, 20 nt, Artificial Sequence
  synthesized
gaucccaguccccaagacau

SEQ ID NO: 2287 - RNA, 20 nt, Artificial Sequence
  synthesized
gaucccaguccccaagauau

SEQ ID NO: 2288 - RNA, 20 nt, Artificial Sequence
  synthesized
gcaaagucugcacaaauauc

SEQ ID NO: 2289 - RNA, 20 nt, Artificial Sequence
  synthesized
gcaaagucugcacaaauguc

SEQ ID NO: 2290 - RNA, 20 nt, Artificial Sequence
  synthesized
ggaucccaguccccaagaca

SEQ ID NO: 2291 - RNA, 20 nt, Artificial Sequence
  synthesized
ggaucccaguccccaagaua

SEQ ID NO: 2292 - RNA, 20 nt, Artificial Sequence
  synthesized
guccccaagacauuugugca

SEQ ID NO: 2293 - RNA, 20 nt, Artificial Sequence
  synthesized
guccccaagauauuugugca

SEQ ID NO: 2294 - RNA, 20 nt, Artificial Sequence
  synthesized
gucugcacaaauaucuuggg

SEQ ID NO: 2295 - RNA, 20 nt, Artificial Sequence
  synthesized
gucugcacaaaugucuuggg

SEQ ID NO: 2296 - RNA, 20 nt, Artificial Sequence
  synthesized
gucuuggggacugggaucca

SEQ ID NO: 2297 - RNA, 20 nt, Artificial Sequence
  synthesized
uagcaaagucugcacaaaua

SEQ ID NO: 2298 - RNA, 20 nt, Artificial Sequence
  synthesized
uagcaaagucugcacaaaug

SEQ ID NO: 2299 - RNA, 20 nt, Artificial Sequence
  synthesized
uaucuuggggacugggaucc

SEQ ID NO: 2300 - RNA, 20 nt, Artificial Sequence
  synthesized
ucccaguccccaagauauuu

SEQ ID NO: 2301 - RNA, 20 nt, Artificial Sequence
  synthesized
uccccaagacauuugugcag

SEQ ID NO: 2302 - RNA, 20 nt, Artificial Sequence
  synthesized
uccccaagauauuugugcag

SEQ ID NO: 2303 - RNA, 20 nt, Artificial Sequence
  synthesized
ucugcacaaauaucuugggg

SEQ ID NO: 2304 - RNA, 20 nt, Artificial Sequence
  synthesized
ucugcacaaaugucuugggg

SEQ ID NO: 2305 - RNA, 20 nt, Artificial Sequence
  synthesized
uggaucccaguccccaagac

SEQ ID NO: 2306 - RNA, 20 nt, Artificial Sequence
  synthesized
uggaucccaguccccaagau

SEQ ID NO: 2307 - RNA, 20 nt, Artificial Sequence
  synthesized
ugucuuggggacugggaucc

SEQ ID NO: 2308 - RNA, 20 nt, Artificial Sequence
  synthesized
aaggcagguauuagcauggc

SEQ ID NO: 2309 - RNA, 20 nt, Artificial Sequence
  synthesized
aaggcagguauuagcauggg

SEQ ID NO: 2310 - RNA, 20 nt, Artificial Sequence
  synthesized
agcauggcauggcagcaggg

SEQ ID NO: 2311 - RNA, 20 nt, Artificial Sequence
  synthesized
agcaugggauggcagcaggg

SEQ ID NO: 2312 - RNA, 20 nt, Artificial Sequence
  synthesized
agcucccugcugccauccca

SEQ ID NO: 2313 - RNA, 20 nt, Artificial Sequence
  synthesized
agcucccugcugccaugcca

SEQ ID NO: 2314 - RNA, 20 nt, Artificial Sequence
  synthesized
aggcagguauuagcauggca

SEQ ID NO: 2315 - RNA, 20 nt, Artificial Sequence
  synthesized
aggcagguauuagcauggga

SEQ ID NO: 2316 - RNA, 20 nt, Artificial Sequence
  synthesized
agguauuagcauggcauggc

SEQ ID NO: 2317 - RNA, 20 nt, Artificial Sequence
  synthesized
agguauuagcaugggauggc

SEQ ID NO: 2318 - RNA, 20 nt, Artificial Sequence
  synthesized
aucccaugcuaauaccugcc

SEQ ID NO: 2319 - RNA, 20 nt, Artificial Sequence
  synthesized
augccaugcuaauaccugcc

SEQ ID NO: 2320 - RNA, 20 nt, Artificial Sequence
  synthesized
auggcauggcagcagggagc

SEQ ID NO: 2321 - RNA, 20 nt, Artificial Sequence
  synthesized
augggauggcagcagggagc

SEQ ID NO: 2322 - RNA, 20 nt, Artificial Sequence
  synthesized
auuagcaugggauggcagca

SEQ ID NO: 2323 - RNA, 20 nt, Artificial Sequence
  synthesized
cagcucccugcugccauccc

SEQ ID NO: 2324 - RNA, 20 nt, Artificial Sequence
  synthesized
cagcucccugcugccaugcc

SEQ ID NO: 2325 - RNA, 20 nt, Artificial Sequence
  synthesized
cagguauuagcauggcaugg

SEQ ID NO: 2326 - RNA, 20 nt, Artificial Sequence
  synthesized
cagguauuagcaugggaugg

SEQ ID NO: 2327 - RNA, 20 nt, Artificial Sequence
  synthesized
caucccaugcuaauaccugc

SEQ ID NO: 2328 - RNA, 20 nt, Artificial Sequence
  synthesized
caugccaugcuaauaccugc

SEQ ID NO: 2329 - RNA, 20 nt, Artificial Sequence
  synthesized
cauggcagcagggagcugag

SEQ ID NO: 2330 - RNA, 20 nt, Artificial Sequence
  synthesized
cauggcauggcagcagggag

SEQ ID NO: 2331 - RNA, 20 nt, Artificial Sequence
  synthesized
caugggauggcagcagggag

SEQ ID NO: 2332 - RNA, 20 nt, Artificial Sequence
  synthesized
ccaucccaugcuaauaccug

SEQ ID NO: 2333 - RNA, 20 nt, Artificial Sequence
  synthesized
ccaugccaugcuaauaccug

SEQ ID NO: 2334 - RNA, 20 nt, Artificial Sequence
  synthesized
cccaugcuaauaccugccuu

SEQ ID NO: 2335 - RNA, 20 nt, Artificial Sequence
  synthesized
cccugcugccaucccaugcu

SEQ ID NO: 2336 - RNA, 20 nt, Artificial Sequence
  synthesized
cccugcugccaugccaugcu

SEQ ID NO: 2337 - RNA, 20 nt, Artificial Sequence
  synthesized
ccugcugccaucccaugcua

SEQ ID NO: 2338 - RNA, 20 nt, Artificial Sequence
  synthesized
ccugcugccaugccaugcua

SEQ ID NO: 2339 - RNA, 20 nt, Artificial Sequence
  synthesized
cucagcucccugcugccauc

SEQ ID NO: 2340 - RNA, 20 nt, Artificial Sequence
  synthesized
cucagcucccugcugccaug

SEQ ID NO: 2341 - RNA, 20 nt, Artificial Sequence
  synthesized
cucccugcugccaucccaug

SEQ ID NO: 2342 - RNA, 20 nt, Artificial Sequence
  synthesized
cucccugcugccaugccaug

SEQ ID NO: 2343 - RNA, 20 nt, Artificial Sequence
  synthesized
cugccaucccaugcuaauac

SEQ ID NO: 2344 - RNA, 20 nt, Artificial Sequence
  synthesized
cugccaugccaugcuaauac

SEQ ID NO: 2345 - RNA, 20 nt, Artificial Sequence
  synthesized
cugcugccaucccaugcuaa

SEQ ID NO: 2346 - RNA, 20 nt, Artificial Sequence
  synthesized
cugcugccaugccaugcuaa

SEQ ID NO: 2347 - RNA, 20 nt, Artificial Sequence
  synthesized
gcagguauuagcauggcaug

SEQ ID NO: 2348 - RNA, 20 nt, Artificial Sequence
  synthesized
gcagguauuagcaugggaug

SEQ ID NO: 2349 - RNA, 20 nt, Artificial Sequence
  synthesized
gcauggcagcagggagcuga

SEQ ID NO: 2350 - RNA, 20 nt, Artificial Sequence
  synthesized
gcauggcauggcagcaggga

SEQ ID NO: 2351 - RNA, 20 nt, Artificial Sequence
  synthesized
gcaugggauggcagcaggga

SEQ ID NO: 2352 - RNA, 20 nt, Artificial Sequence
  synthesized
gccaucccaugcuaauaccu

SEQ ID NO: 2353 - RNA, 20 nt, Artificial Sequence
  synthesized
gccaugccaugcuaauaccu

SEQ ID NO: 2354 - RNA, 20 nt, Artificial Sequence
  synthesized
gccaugcuaauaccugccuu

SEQ ID NO: 2355 - RNA, 20 nt, Artificial Sequence
  synthesized
gcucccugcugccaucccau

SEQ ID NO: 2356 - RNA, 20 nt, Artificial Sequence
  synthesized
gcucccugcugccaugccau

SEQ ID NO: 2357 - RNA, 20 nt, Artificial Sequence
  synthesized
gcugccaucccaugcuaaua

SEQ ID NO: 2358 - RNA, 20 nt, Artificial Sequence
  synthesized
gcugccaugccaugcuaaua

SEQ ID NO: 2359 - RNA, 20 nt, Artificial Sequence
  synthesized
ggcagguauuagcauggcau

SEQ ID NO: 2360 - RNA, 20 nt, Artificial Sequence
  synthesized
ggcagguauuagcaugggau

SEQ ID NO: 2361 - RNA, 20 nt, Artificial Sequence
  synthesized
ggcauggcagcagggagcug

SEQ ID NO: 2362 - RNA, 20 nt, Artificial Sequence
  synthesized
gguauuagcauggcauggca

SEQ ID NO: 2363 - RNA, 20 nt, Artificial Sequence
  synthesized
gguauuagcaugggauggca

SEQ ID NO: 2364 - RNA, 20 nt, Artificial Sequence
  synthesized
guauuagcauggcauggcag

SEQ ID NO: 2365 - RNA, 20 nt, Artificial Sequence
  synthesized
guauuagcaugggauggcag

SEQ ID NO: 2366 - RNA, 20 nt, Artificial Sequence
  synthesized
uagcauggcauggcagcagg

SEQ ID NO: 2367 - RNA, 20 nt, Artificial Sequence
  synthesized
uagcaugggauggcagcagg

SEQ ID NO: 2368 - RNA, 20 nt, Artificial Sequence
  synthesized
uauuagcauggcauggcagc

SEQ ID NO: 2369 - RNA, 20 nt, Artificial Sequence
  synthesized
uauuagcaugggauggcagc

SEQ ID NO: 2370 - RNA, 20 nt, Artificial Sequence
  synthesized
ucagcucccugcugccaucc

SEQ ID NO: 2371 - RNA, 20 nt, Artificial Sequence
  synthesized
ucagcucccugcugccaugc

SEQ ID NO: 2372 - RNA, 20 nt, Artificial Sequence
  synthesized
ucccaugcuaauaccugccu

SEQ ID NO: 2373 - RNA, 20 nt, Artificial Sequence
  synthesized
ucccugcugccaucccaugc

SEQ ID NO: 2374 - RNA, 20 nt, Artificial Sequence
  synthesized
ugccaucccaugcuaauacc

SEQ ID NO: 2375 - RNA, 20 nt, Artificial Sequence
  synthesized
ugccaugccaugcuaauacc

SEQ ID NO: 2376 - RNA, 20 nt, Artificial Sequence
  synthesized
ugccaugcuaauaccugccu

SEQ ID NO: 2377 - RNA, 20 nt, Artificial Sequence
  synthesized
ugcugccaucccaugcuaau

SEQ ID NO: 2378 - RNA, 20 nt, Artificial Sequence
  synthesized
ugcugccaugccaugcuaau

SEQ ID NO: 2379 - RNA, 20 nt, Artificial Sequence
  synthesized
uggcauggcagcagggagcu

SEQ ID NO: 2380 - RNA, 20 nt, Artificial Sequence
  synthesized
ugggauggcagcagggagcu

SEQ ID NO: 2381 - RNA, 20 nt, Artificial Sequence
  synthesized
uuagcauggcauggcagcag

SEQ ID NO: 2382 - RNA, 20 nt, Artificial Sequence
  synthesized
uuagcaugggauggcagcag

SEQ ID NO: 2383 - RNA, 20 nt, Artificial Sequence
  synthesized
aaaucugagcugcuguccgu

SEQ ID NO: 2384 - RNA, 20 nt, Artificial Sequence
  synthesized
aaaucugagcuucuguccgu

SEQ ID NO: 2385 - RNA, 20 nt, Artificial Sequence
  synthesized
aagcucagauuugauucgga

SEQ ID NO: 2386 - RNA, 20 nt, Artificial Sequence
  synthesized
aaucaaaucugagcugcugu

SEQ ID NO: 2387 - RNA, 20 nt, Artificial Sequence
  synthesized
aaucaaaucugagcuucugu

SEQ ID NO: 2388 - RNA, 20 nt, Artificial Sequence
  synthesized
aaucugagcugcuguccgug

SEQ ID NO: 2389 - RNA, 20 nt, Artificial Sequence
  synthesized
aaucugagcuucuguccgug

SEQ ID NO: 2390 - RNA, 20 nt, Artificial Sequence
  synthesized
accacggacagaagcucaga

SEQ ID NO: 2391 - RNA, 20 nt, Artificial Sequence
  synthesized
accacggacagcagcucaga

SEQ ID NO: 2392 - RNA, 20 nt, Artificial Sequence
  synthesized
acggacagaagcucagauuu

SEQ ID NO: 2393 - RNA, 20 nt, Artificial Sequence
  synthesized
acggacagcagcucagauuu

SEQ ID NO: 2394 - RNA, 20 nt, Artificial Sequence
  synthesized
agaagcucagauuugauucg

SEQ ID NO: 2395 - RNA, 20 nt, Artificial Sequence
  synthesized
agaccacggacagaagcuca

SEQ ID NO: 2396 - RNA, 20 nt, Artificial Sequence
  synthesized
agaccacggacagcagcuca

SEQ ID NO: 2397 - RNA, 20 nt, Artificial Sequence
  synthesized
agcagcucagauuugauucg

SEQ ID NO: 2398 - RNA, 20 nt, Artificial Sequence
  synthesized
agcugcuguccguggucuuc

SEQ ID NO: 2399 - RNA, 20 nt, Artificial Sequence
  synthesized
agcuucuguccguggucuuc

SEQ ID NO: 2400 - RNA, 20 nt, Artificial Sequence
  synthesized
aucugagcugcuguccgugg

SEQ ID NO: 2401 - RNA, 20 nt, Artificial Sequence
  synthesized
aucugagcuucuguccgugg

SEQ ID NO: 2402 - RNA, 20 nt, Artificial Sequence
  synthesized
cagcucagauuugauucgga

SEQ ID NO: 2403 - RNA, 20 nt, Artificial Sequence
  synthesized
ccacggacagaagcucagau

SEQ ID NO: 2404 - RNA, 20 nt, Artificial Sequence
  synthesized
ccacggacagcagcucagau

SEQ ID NO: 2405 - RNA, 20 nt, Artificial Sequence
  synthesized
ccgaaucaaaucugagcuuc

SEQ ID NO: 2406 - RNA, 20 nt, Artificial Sequence
  synthesized
ccgugaagaccacggacaga

SEQ ID NO: 2407 - RNA, 20 nt, Artificial Sequence
  synthesized
ccgugaagaccacggacagc

SEQ ID NO: 2408 - RNA, 20 nt, Artificial Sequence
  synthesized
cgaaucaaaucugagcugcu

SEQ ID NO: 2409 - RNA, 20 nt, Artificial Sequence
  synthesized
cgaaucaaaucugagcuucu

SEQ ID NO: 2410 - RNA, 20 nt, Artificial Sequence
  synthesized
cggacagaagcucagauuug

SEQ ID NO: 2411 - RNA, 20 nt, Artificial Sequence
  synthesized
cggacagcagcucagauuug

SEQ ID NO: 2412 - RNA, 20 nt, Artificial Sequence
  synthesized
cgugaagaccacggacagaa

SEQ ID NO: 2413 - RNA, 20 nt, Artificial Sequence
  synthesized
cgugaagaccacggacagca

SEQ ID NO: 2414 - RNA, 20 nt, Artificial Sequence
  synthesized
cugagcugcuguccgugguc

SEQ ID NO: 2415 - RNA, 20 nt, Artificial Sequence
  synthesized
cugagcuucuguccgugguc

SEQ ID NO: 2416 - RNA, 20 nt, Artificial Sequence
  synthesized
cugcuguccguggucuucac

SEQ ID NO: 2417 - RNA, 20 nt, Artificial Sequence
  synthesized
gaagaccacggacagaagcu

SEQ ID NO: 2418 - RNA, 20 nt, Artificial Sequence
  synthesized
gaagaccacggacagcagcu

SEQ ID NO: 2419 - RNA, 20 nt, Artificial Sequence
  synthesized
gaaucaaaucugagcugcug

SEQ ID NO: 2420 - RNA, 20 nt, Artificial Sequence
  synthesized
gaaucaaaucugagcuucug

SEQ ID NO: 2421 - RNA, 20 nt, Artificial Sequence
  synthesized
gacagaagcucagauuugau

SEQ ID NO: 2422 - RNA, 20 nt, Artificial Sequence
  synthesized
gcuguccguggucuucacgg

SEQ ID NO: 2423 - RNA, 20 nt, Artificial Sequence
  synthesized
ggacagaagcucagauuuga

SEQ ID NO: 2424 - RNA, 20 nt, Artificial Sequence
  synthesized
ggacagcagcucagauuuga

SEQ ID NO: 2425 - RNA, 20 nt, Artificial Sequence
  synthesized
ucaaaucugagcugcugucc

SEQ ID NO: 2426 - RNA, 20 nt, Artificial Sequence
  synthesized
ucaaaucugagcuucugucc

SEQ ID NO: 2427 - RNA, 20 nt, Artificial Sequence
  synthesized
uccgaaucaaaucugagcug

SEQ ID NO: 2428 - RNA, 20 nt, Artificial Sequence
  synthesized
ucugagcugcuguccguggu

SEQ ID NO: 2429 - RNA, 20 nt, Artificial Sequence
  synthesized
ucugagcuucuguccguggu

SEQ ID NO: 2430 - RNA, 20 nt, Artificial Sequence
  synthesized
ucuguccguggucuucacgg

SEQ ID NO: 2431 - RNA, 20 nt, Artificial Sequence
  synthesized
ugaagaccacggacagaagc

SEQ ID NO: 2432 - RNA, 20 nt, Artificial Sequence
  synthesized
ugaagaccacggacagcagc

SEQ ID NO: 2433 - RNA, 20 nt, Artificial Sequence
  synthesized
ugagcugcuguccguggucu

SEQ ID NO: 2434 - RNA, 20 nt, Artificial Sequence
  synthesized
ugagcuucuguccguggucu

SEQ ID NO: 2435 - RNA, 20 nt, Artificial Sequence
  synthesized
ugcuguccguggucuucacg

SEQ ID NO: 2436 - RNA, 20 nt, Artificial Sequence
  synthesized
uucuguccguggucuucacg

SEQ ID NO: 2437 - RNA, 20 nt, Artificial Sequence
  synthesized
acccgguacucuccccggca

SEQ ID NO: 2438 - RNA, 20 nt, Artificial Sequence
  synthesized
acucuccccggcagccccac

SEQ ID NO: 2439 - RNA, 20 nt, Artificial Sequence
  synthesized
agguguggggcugccgggga

SEQ ID NO: 2440 - RNA, 20 nt, Artificial Sequence
  synthesized
ccccggcagccccacaccuc

SEQ ID NO: 2441 - RNA, 20 nt, Artificial Sequence
  synthesized
cccggcagccccacaccucc

SEQ ID NO: 2442 - RNA, 20 nt, Artificial Sequence
  synthesized
ccggcagccccacaccuccu

SEQ ID NO: 2443 - RNA, 20 nt, Artificial Sequence
  synthesized
ccggggagaguaccggguca

SEQ ID NO: 2444 - RNA, 20 nt, Artificial Sequence
  synthesized
ccgguacucuccccggcagc

SEQ ID NO: 2445 - RNA, 20 nt, Artificial Sequence
  synthesized
cggggagaguaccgggucag

SEQ ID NO: 2446 - RNA, 20 nt, Artificial Sequence
  synthesized
cgggggagaguaccggguca

SEQ ID NO: 2447 - RNA, 20 nt, Artificial Sequence
  synthesized
cuccccggcagccccacacc

SEQ ID NO: 2448 - RNA, 20 nt, Artificial Sequence
  synthesized
cucuccccggcagccccaca

SEQ ID NO: 2449 - RNA, 20 nt, Artificial Sequence
  synthesized
cugacccgguacucuccccc

SEQ ID NO: 2450 - RNA, 20 nt, Artificial Sequence
  synthesized
cugacccgguacucuccccg

SEQ ID NO: 2451 - RNA, 20 nt, Artificial Sequence
  synthesized
gacccgguacucuccccggc

SEQ ID NO: 2452 - RNA, 20 nt, Artificial Sequence
  synthesized
gcugccggggagaguaccgg

SEQ ID NO: 2453 - RNA, 20 nt, Artificial Sequence
  synthesized
ggcagccccacaccuccuac

SEQ ID NO: 2454 - RNA, 20 nt, Artificial Sequence
  synthesized
ggcugccggggagaguaccg

SEQ ID NO: 2455 - RNA, 20 nt, Artificial Sequence
  synthesized
gggggagaguaccgggucag

SEQ ID NO: 2456 - RNA, 20 nt, Artificial Sequence
  synthesized
gguacucuccccggcagccc

SEQ ID NO: 2457 - RNA, 20 nt, Artificial Sequence
  synthesized
gguguggggcugccggggag

SEQ ID NO: 2458 - RNA, 20 nt, Artificial Sequence
  synthesized
guacucuccccggcagcccc

SEQ ID NO: 2459 - RNA, 20 nt, Artificial Sequence
  synthesized
guggggcugccggggagagu

SEQ ID NO: 2460 - RNA, 20 nt, Artificial Sequence
  synthesized
guguggggcugccggggaga

SEQ ID NO: 2461 - RNA, 20 nt, Artificial Sequence
  synthesized
uacucuccccggcagcccca

SEQ ID NO: 2462 - RNA, 20 nt, Artificial Sequence
  synthesized
uccccggcagccccacaccu

SEQ ID NO: 2463 - RNA, 20 nt, Artificial Sequence
  synthesized
ucuccccggcagccccacac

SEQ ID NO: 2464 - RNA, 20 nt, Artificial Sequence
  synthesized
ugacccgguacucuccccgg

SEQ ID NO: 2465 - RNA, 20 nt, Artificial Sequence
  synthesized
ugccggggagaguaccgggu

SEQ ID NO: 2466 - RNA, 20 nt, Artificial Sequence
  synthesized
ugcgggggagaguaccgggu

SEQ ID NO: 2467 - RNA, 20 nt, Artificial Sequence
  synthesized
uguggggcugccggggagag

SEQ ID NO: 2468 - RNA, 20 nt, Artificial Sequence
  synthesized
acugaccacaagcagccuag

SEQ ID NO: 2469 - RNA, 20 nt, Artificial Sequence
  synthesized
acuggacccacugaccacaa

SEQ ID NO: 2470 - RNA, 20 nt, Artificial Sequence
  synthesized
acuggacccagugaccacaa

SEQ ID NO: 2471 - RNA, 20 nt, Artificial Sequence
  synthesized
agacuggacccacugaccac

SEQ ID NO: 2472 - RNA, 20 nt, Artificial Sequence
  synthesized
agacuggacccagugaccac

SEQ ID NO: 2473 - RNA, 20 nt, Artificial Sequence
  synthesized
aggcugcuuguggucacugg

SEQ ID NO: 2474 - RNA, 20 nt, Artificial Sequence
  synthesized
aggcugcuuguggucagugg

SEQ ID NO: 2475 - RNA, 20 nt, Artificial Sequence
  synthesized
auuuuagacuggacccacug

SEQ ID NO: 2476 - RNA, 20 nt, Artificial Sequence
  synthesized
auuuuagacuggacccagug

SEQ ID NO: 2477 - RNA, 20 nt, Artificial Sequence
  synthesized
cacugaccacaagcagccua

SEQ ID NO: 2478 - RNA, 20 nt, Artificial Sequence
  synthesized
cagugaccacaagcagccua

SEQ ID NO: 2479 - RNA, 20 nt, Artificial Sequence
  synthesized
cccacugaccacaagcagcc

SEQ ID NO: 2480 - RNA, 20 nt, Artificial Sequence
  synthesized
cccagugaccacaagcagcc

SEQ ID NO: 2481 - RNA, 20 nt, Artificial Sequence
  synthesized
cugaccacaagcagccuagg

SEQ ID NO: 2482 - RNA, 20 nt, Artificial Sequence
  synthesized
cugcuuguggucacuggguc

SEQ ID NO: 2483 - RNA, 20 nt, Artificial Sequence
  synthesized
cugcuuguggucaguggguc

SEQ ID NO: 2484 - RNA, 20 nt, Artificial Sequence
  synthesized
cuggacccacugaccacaag

SEQ ID NO: 2485 - RNA, 20 nt, Artificial Sequence
  synthesized
cuggacccagugaccacaag

SEQ ID NO: 2486 - RNA, 20 nt, Artificial Sequence
  synthesized
cuuguggucacuggguccag

SEQ ID NO: 2487 - RNA, 20 nt, Artificial Sequence
  synthesized
cuuguggucaguggguccag

SEQ ID NO: 2488 - RNA, 20 nt, Artificial Sequence
  synthesized
gacccacugaccacaagcag

SEQ ID NO: 2489 - RNA, 20 nt, Artificial Sequence
  synthesized
gacccagugaccacaagcag

SEQ ID NO: 2490 - RNA, 20 nt, Artificial Sequence
  synthesized
gcugcuuguggucacugggu

SEQ ID NO: 2491 - RNA, 20 nt, Artificial Sequence
  synthesized
gcugcuuguggucagugggu

SEQ ID NO: 2492 - RNA, 20 nt, Artificial Sequence
  synthesized
gcuuguggucacugggucca

SEQ ID NO: 2493 - RNA, 20 nt, Artificial Sequence
  synthesized
gcuuguggucagugggucca

SEQ ID NO: 2494 - RNA, 20 nt, Artificial Sequence
  synthesized
ggacccacugaccacaagca

SEQ ID NO: 2495 - RNA, 20 nt, Artificial Sequence
  synthesized
ggacccagugaccacaagca

SEQ ID NO: 2496 - RNA, 20 nt, Artificial Sequence
  synthesized
ggucacuggguccagucuaa

SEQ ID NO: 2497 - RNA, 20 nt, Artificial Sequence
  synthesized
ggucaguggguccagucuaa

SEQ ID NO: 2498 - RNA, 20 nt, Artificial Sequence
  synthesized
gucacuggguccagucuaaa

SEQ ID NO: 2499 - RNA, 20 nt, Artificial Sequence
  synthesized
gucaguggguccagucuaaa

SEQ ID NO: 2500 - RNA, 20 nt, Artificial Sequence
  synthesized
gugaccacaagcagccuagg

SEQ ID NO: 2501 - RNA, 20 nt, Artificial Sequence
  synthesized
guggucacuggguccagucu

SEQ ID NO: 2502 - RNA, 20 nt, Artificial Sequence
  synthesized
guggucaguggguccagucu

SEQ ID NO: 2503 - RNA, 20 nt, Artificial Sequence
  synthesized
uagacuggacccacugacca

SEQ ID NO: 2504 - RNA, 20 nt, Artificial Sequence
  synthesized
uagacuggacccagugacca

SEQ ID NO: 2505 - RNA, 20 nt, Artificial Sequence
  synthesized
uaggcugcuuguggucacug

SEQ ID NO: 2506 - RNA, 20 nt, Artificial Sequence
  synthesized
uaggcugcuuguggucagug

SEQ ID NO: 2507 - RNA, 20 nt, Artificial Sequence
  synthesized
ugcuuguggucacugggucc

SEQ ID NO: 2508 - RNA, 20 nt, Artificial Sequence
  synthesized
ugcuuguggucagugggucc

SEQ ID NO: 2509 - RNA, 20 nt, Artificial Sequence
  synthesized
uggacccacugaccacaagc

SEQ ID NO: 2510 - RNA, 20 nt, Artificial Sequence
  synthesized
uggucacuggguccagucua

SEQ ID NO: 2511 - RNA, 20 nt, Artificial Sequence
  synthesized
uggucaguggguccagucua

SEQ ID NO: 2512 - RNA, 20 nt, Artificial Sequence
  synthesized
uguggucacuggguccaguc

SEQ ID NO: 2513 - RNA, 20 nt, Artificial Sequence
  synthesized
uguggucaguggguccaguc

SEQ ID NO: 2514 - RNA, 20 nt, Artificial Sequence
  synthesized
uuguggucacuggguccagu

SEQ ID NO: 2515 - RNA, 20 nt, Artificial Sequence
  synthesized
uuguggucaguggguccagu

SEQ ID NO: 2516 - RNA, 20 nt, Artificial Sequence
  synthesized
uuuagacuggacccacugac

SEQ ID NO: 2517 - RNA, 20 nt, Artificial Sequence
  synthesized
uuuagacuggacccagugac

SEQ ID NO: 2518 - RNA, 20 nt, Artificial Sequence
  synthesized
uuuuagacuggacccacuga

SEQ ID NO: 2519 - RNA, 20 nt, Artificial Sequence
  synthesized
uuuuagacuggacccaguga

SEQ ID NO: 2520 - RNA, 20 nt, Artificial Sequence
  synthesized
accuccugugcccugcucga

SEQ ID NO: 2521 - RNA, 20 nt, Artificial Sequence
  synthesized
accuccugugcccugcucgg

SEQ ID NO: 2522 - RNA, 20 nt, Artificial Sequence
  synthesized
ccgagcagggcacaggaggu

SEQ ID NO: 2523 - RNA, 20 nt, Artificial Sequence
  synthesized
ccuccccucgggccucuccc

SEQ ID NO: 2524 - RNA, 20 nt, Artificial Sequence
  synthesized
ccuccccucgggccucucuc

SEQ ID NO: 2525 - RNA, 20 nt, Artificial Sequence
  synthesized
ccugugcccugcucgagaga

SEQ ID NO: 2526 - RNA, 20 nt, Artificial Sequence
  synthesized
ccugugcccugcucgggaga

SEQ ID NO: 2527 - RNA, 20 nt, Artificial Sequence
  synthesized
cgggccucucccgagcaggg

SEQ ID NO: 2528 - RNA, 20 nt, Artificial Sequence
  synthesized
cgggccucucucgagcaggg

SEQ ID NO: 2529 - RNA, 20 nt, Artificial Sequence
  synthesized
cuccccucgggccucucccg

SEQ ID NO: 2530 - RNA, 20 nt, Artificial Sequence
  synthesized
cuccccucgggccucucucg

SEQ ID NO: 2531 - RNA, 20 nt, Artificial Sequence
  synthesized
cuccugugcccugcucgaga

SEQ ID NO: 2532 - RNA, 20 nt, Artificial Sequence
  synthesized
cuccugugcccugcucggga

SEQ ID NO: 2533 - RNA, 20 nt, Artificial Sequence
  synthesized
cucgggccucucccgagcag

SEQ ID NO: 2534 - RNA, 20 nt, Artificial Sequence
  synthesized
cucgggccucucucgagcag

SEQ ID NO: 2535 - RNA, 20 nt, Artificial Sequence
  synthesized
cucucccgagcagggcacag

SEQ ID NO: 2536 - RNA, 20 nt, Artificial Sequence
  synthesized
cucucucgagcagggcacag

SEQ ID NO: 2537 - RNA, 20 nt, Artificial Sequence
  synthesized
cugugcccugcucgggagag

SEQ ID NO: 2538 - RNA, 20 nt, Artificial Sequence
  synthesized
gcccugcucgagagaggccc

SEQ ID NO: 2539 - RNA, 20 nt, Artificial Sequence
  synthesized
gcccugcucgggagaggccc

SEQ ID NO: 2540 - RNA, 20 nt, Artificial Sequence
  synthesized
gcucgagagaggcccgaggg

SEQ ID NO: 2541 - RNA, 20 nt, Artificial Sequence
  synthesized
gcucgggagaggcccgaggg

SEQ ID NO: 2542 - RNA, 20 nt, Artificial Sequence
  synthesized
ggccucucccgagcagggca

SEQ ID NO: 2543 - RNA, 20 nt, Artificial Sequence
  synthesized
ggccucucucgagcagggca

SEQ ID NO: 2544 - RNA, 20 nt, Artificial Sequence
  synthesized
gggccucucccgagcagggc

SEQ ID NO: 2545 - RNA, 20 nt, Artificial Sequence
  synthesized
gugcccugcucgggagaggc

SEQ ID NO: 2546 - RNA, 20 nt, Artificial Sequence
  synthesized
uccccucgggccucucccga

SEQ ID NO: 2547 - RNA, 20 nt, Artificial Sequence
  synthesized
uccccucgggccucucucga

SEQ ID NO: 2548 - RNA, 20 nt, Artificial Sequence
  synthesized
ucccgagcagggcacaggag

SEQ ID NO: 2549 - RNA, 20 nt, Artificial Sequence
  synthesized
ucgagcagggcacaggaggu

SEQ ID NO: 2550 - RNA, 20 nt, Artificial Sequence
  synthesized
ucgggccucucccgagcagg

SEQ ID NO: 2551 - RNA, 20 nt, Artificial Sequence
  synthesized
ucucgagcagggcacaggag

SEQ ID NO: 2552 - RNA, 20 nt, Artificial Sequence
  synthesized
ugugcccugcucgagagagg

SEQ ID NO: 2553 - RNA, 20 nt, Artificial Sequence
  synthesized
ugugcccugcucgggagagg

SEQ ID NO: 2554 - RNA, 20 nt, Artificial Sequence
  synthesized
agcgccucauacccgcagac

SEQ ID NO: 2555 - RNA, 20 nt, Artificial Sequence
  synthesized
agcgccucguacccgcagac

SEQ ID NO: 2556 - RNA, 20 nt, Artificial Sequence
  synthesized
agguccccuggagcgccuca

SEQ ID NO: 2557 - RNA, 20 nt, Artificial Sequence
  synthesized
agguccccuggagcgccucg

SEQ ID NO: 2558 - RNA, 20 nt, Artificial Sequence
  synthesized
auacccgcagaccgcagacc

SEQ ID NO: 2559 - RNA, 20 nt, Artificial Sequence
  synthesized
cauacccgcagaccgcagac

SEQ ID NO: 2560 - RNA, 20 nt, Artificial Sequence
  synthesized
ccccuggagcgccucauacc

SEQ ID NO: 2561 - RNA, 20 nt, Artificial Sequence
  synthesized
ccccuggagcgccucguacc

SEQ ID NO: 2562 - RNA, 20 nt, Artificial Sequence
  synthesized
ccucauacccgcagaccgca

SEQ ID NO: 2563 - RNA, 20 nt, Artificial Sequence
  synthesized
ccucguacccgcagaccgca

SEQ ID NO: 2564 - RNA, 20 nt, Artificial Sequence
  synthesized
ccuggagcgccucauacccg

SEQ ID NO: 2565 - RNA, 20 nt, Artificial Sequence
  synthesized
ccuggagcgccucguacccg

SEQ ID NO: 2566 - RNA, 20 nt, Artificial Sequence
  synthesized
cgaggcgcuccaggggaccu

SEQ ID NO: 2567 - RNA, 20 nt, Artificial Sequence
  synthesized
cgccucauacccgcagaccg

SEQ ID NO: 2568 - RNA, 20 nt, Artificial Sequence
  synthesized
cgccucguacccgcagaccg

SEQ ID NO: 2569 - RNA, 20 nt, Artificial Sequence
  synthesized
cggucugcggguacgaggcg

SEQ ID NO: 2570 - RNA, 20 nt, Artificial Sequence
  synthesized
cggucugcggguaugaggcg

SEQ ID NO: 2571 - RNA, 20 nt, Artificial Sequence
  synthesized
cguacccgcagaccgcagac

SEQ ID NO: 2572 - RNA, 20 nt, Artificial Sequence
  synthesized
cucauacccgcagaccgcag

SEQ ID NO: 2573 - RNA, 20 nt, Artificial Sequence
  synthesized
cucguacccgcagaccgcag

SEQ ID NO: 2574 - RNA, 20 nt, Artificial Sequence
  synthesized
cugcggucugcggguacgag

SEQ ID NO: 2575 - RNA, 20 nt, Artificial Sequence
  synthesized
cugcggucugcggguaugag

SEQ ID NO: 2576 - RNA, 20 nt, Artificial Sequence
  synthesized
gagcgccucauacccgcaga

SEQ ID NO: 2577 - RNA, 20 nt, Artificial Sequence
  synthesized
gagcgccucguacccgcaga

SEQ ID NO: 2578 - RNA, 20 nt, Artificial Sequence
  synthesized
gcggucugcggguacgaggc

SEQ ID NO: 2579 - RNA, 20 nt, Artificial Sequence
  synthesized
gcggucugcggguaugaggc

SEQ ID NO: 2580 - RNA, 20 nt, Artificial Sequence
  synthesized
ggagcgccucauacccgcag

SEQ ID NO: 2581 - RNA, 20 nt, Artificial Sequence
  synthesized
ggagcgccucguacccgcag

SEQ ID NO: 2582 - RNA, 20 nt, Artificial Sequence
  synthesized
ggguaugaggcgcuccaggg

SEQ ID NO: 2583 - RNA, 20 nt, Artificial Sequence
  synthesized
gguacgaggcgcuccagggg

SEQ ID NO: 2584 - RNA, 20 nt, Artificial Sequence
  synthesized
gguaugaggcgcuccagggg

SEQ ID NO: 2585 - RNA, 20 nt, Artificial Sequence
  synthesized
ggucugcggguacgaggcgc

SEQ ID NO: 2586 - RNA, 20 nt, Artificial Sequence
  synthesized
ggucugcggguaugaggcgc

SEQ ID NO: 2587 - RNA, 20 nt, Artificial Sequence
  synthesized
ggucugcggucugcggguac

SEQ ID NO: 2588 - RNA, 20 nt, Artificial Sequence
  synthesized
ggucugcggucugcggguau

SEQ ID NO: 2589 - RNA, 20 nt, Artificial Sequence
  synthesized
guacccgcagaccgcagacc

SEQ ID NO: 2590 - RNA, 20 nt, Artificial Sequence
  synthesized
guccccuggagcgccucaua

SEQ ID NO: 2591 - RNA, 20 nt, Artificial Sequence
  synthesized
guccccuggagcgccucgua

SEQ ID NO: 2592 - RNA, 20 nt, Artificial Sequence
  synthesized
gucugcggguacgaggcgcu

SEQ ID NO: 2593 - RNA, 20 nt, Artificial Sequence
  synthesized
gucugcggguaugaggcgcu

SEQ ID NO: 2594 - RNA, 20 nt, Artificial Sequence
  synthesized
uacgaggcgcuccaggggac

SEQ ID NO: 2595 - RNA, 20 nt, Artificial Sequence
  synthesized
uaugaggcgcuccaggggac

SEQ ID NO: 2596 - RNA, 20 nt, Artificial Sequence
  synthesized
ucauacccgcagaccgcaga

SEQ ID NO: 2597 - RNA, 20 nt, Artificial Sequence
  synthesized
uccccuggagcgccucauac

SEQ ID NO: 2598 - RNA, 20 nt, Artificial Sequence
  synthesized
uccccuggagcgccucguac

SEQ ID NO: 2599 - RNA, 20 nt, Artificial Sequence
  synthesized
ucguacccgcagaccgcaga

SEQ ID NO: 2600 - RNA, 20 nt, Artificial Sequence
  synthesized
ucugcggguacgaggcgcuc

SEQ ID NO: 2601 - RNA, 20 nt, Artificial Sequence
  synthesized
ucugcggguaugaggcgcuc

SEQ ID NO: 2602 - RNA, 20 nt, Artificial Sequence
  synthesized
ugaggcgcuccaggggaccu

SEQ ID NO: 2603 - RNA, 20 nt, Artificial Sequence
  synthesized
ugcggucugcggguacgagg

SEQ ID NO: 2604 - RNA, 20 nt, Artificial Sequence
  synthesized
ugcggucugcggguaugagg

SEQ ID NO: 2605 - RNA, 20 nt, Artificial Sequence
  synthesized
aaccaagucagaaggaacca

SEQ ID NO: 2606 - RNA, 20 nt, Artificial Sequence
  synthesized
aauuugguuccuucugacuu

SEQ ID NO: 2607 - RNA, 20 nt, Artificial Sequence
  synthesized
accaagucagaaggaaccaa

SEQ ID NO: 2608 - RNA, 20 nt, Artificial Sequence
  synthesized
ccaagucagaaggaaccaaa

SEQ ID NO: 2609 - RNA, 20 nt, Artificial Sequence
  synthesized
cuaauuugguuccuucugac

SEQ ID NO: 2610 - RNA, 20 nt, Artificial Sequence
  synthesized
aauuguucauugagucggcu

SEQ ID NO: 2611 - RNA, 20 nt, Artificial Sequence
  synthesized
aauuguucauugauucggcu

SEQ ID NO: 2612 - RNA, 20 nt, Artificial Sequence
  synthesized
agccgaaucaaugaacaauu

SEQ ID NO: 2613 - RNA, 20 nt, Artificial Sequence
  synthesized
agccgacucaaugaacaauu

SEQ ID NO: 2614 - RNA, 20 nt, Artificial Sequence
  synthesized
agucggcucacugaugagcc

SEQ ID NO: 2615 - RNA, 20 nt, Artificial Sequence
  synthesized
agugagccgaaucaaugaac

SEQ ID NO: 2616 - RNA, 20 nt, Artificial Sequence
  synthesized
agugagccgacucaaugaac

SEQ ID NO: 2617 - RNA, 20 nt, Artificial Sequence
  synthesized
aucagugagccgaaucaaug

SEQ ID NO: 2618 - RNA, 20 nt, Artificial Sequence
  synthesized
aucagugagccgacucaaug

SEQ ID NO: 2619 - RNA, 20 nt, Artificial Sequence
  synthesized
auucggcucacugaugagcc

SEQ ID NO: 2620 - RNA, 20 nt, Artificial Sequence
  synthesized
auugagucggcucacugaug

SEQ ID NO: 2621 - RNA, 20 nt, Artificial Sequence
  synthesized
auugauucggcucacugaug

SEQ ID NO: 2622 - RNA, 20 nt, Artificial Sequence
  synthesized
auuguucauugagucggcuc

SEQ ID NO: 2623 - RNA, 20 nt, Artificial Sequence
  synthesized
auuguucauugauucggcuc

SEQ ID NO: 2624 - RNA, 20 nt, Artificial Sequence
  synthesized
cagugagccgaaucaaugaa

SEQ ID NO: 2625 - RNA, 20 nt, Artificial Sequence
  synthesized
cagugagccgacucaaugaa

SEQ ID NO: 2626 - RNA, 20 nt, Artificial Sequence
  synthesized
caucagugagccgaaucaau

SEQ ID NO: 2627 - RNA, 20 nt, Artificial Sequence
  synthesized
caucagugagccgacucaau

SEQ ID NO: 2628 - RNA, 20 nt, Artificial Sequence
  synthesized
cauugagucggcucacugau

SEQ ID NO: 2629 - RNA, 20 nt, Artificial Sequence
  synthesized
cauugauucggcucacugau

SEQ ID NO: 2630 - RNA, 20 nt, Artificial Sequence
  synthesized
ccgaaucaaugaacaauuaa

SEQ ID NO: 2631 - RNA, 20 nt, Artificial Sequence
  synthesized
ccgacucaaugaacaauuaa

SEQ ID NO: 2632 - RNA, 20 nt, Artificial Sequence
  synthesized
cgaaucaaugaacaauuaac

SEQ ID NO: 2633 - RNA, 20 nt, Artificial Sequence
  synthesized
cgacucaaugaacaauuaac

SEQ ID NO: 2634 - RNA, 20 nt, Artificial Sequence
  synthesized
gagucggcucacugaugagc

SEQ ID NO: 2635 - RNA, 20 nt, Artificial Sequence
  synthesized
gauucggcucacugaugagc

SEQ ID NO: 2636 - RNA, 20 nt, Artificial Sequence
  synthesized
gccgaaucaaugaacaauua

SEQ ID NO: 2637 - RNA, 20 nt, Artificial Sequence
  synthesized
gccgacucaaugaacaauua

SEQ ID NO: 2638 - RNA, 20 nt, Artificial Sequence
  synthesized
gcucaucagugagccgaauc

SEQ ID NO: 2639 - RNA, 20 nt, Artificial Sequence
  synthesized
gcucaucagugagccgacuc

SEQ ID NO: 2640 - RNA, 20 nt, Artificial Sequence
  synthesized
ggcucaucagugagccgaau

SEQ ID NO: 2641 - RNA, 20 nt, Artificial Sequence
  synthesized
ggcucaucagugagccgacu

SEQ ID NO: 2642 - RNA, 20 nt, Artificial Sequence
  synthesized
gggcucaucagugagccgaa

SEQ ID NO: 2643 - RNA, 20 nt, Artificial Sequence
  synthesized
gggcucaucagugagccgac

SEQ ID NO: 2644 - RNA, 20 nt, Artificial Sequence
  synthesized
gucggcucacugaugagccc

SEQ ID NO: 2645 - RNA, 20 nt, Artificial Sequence
  synthesized
guuaauuguucauugagucg

SEQ ID NO: 2646 - RNA, 20 nt, Artificial Sequence
  synthesized
guuaauuguucauugauucg

SEQ ID NO: 2647 - RNA, 20 nt, Artificial Sequence
  synthesized
guucauugagucggcucacu

SEQ ID NO: 2648 - RNA, 20 nt, Artificial Sequence
  synthesized
guucauugauucggcucacu

SEQ ID NO: 2649 - RNA, 20 nt, Artificial Sequence
  synthesized
uaauuguucauugagucggc

SEQ ID NO: 2650 - RNA, 20 nt, Artificial Sequence
  synthesized
uaauuguucauugauucggc

SEQ ID NO: 2651 - RNA, 20 nt, Artificial Sequence
  synthesized
ucagugagccgaaucaauga

SEQ ID NO: 2652 - RNA, 20 nt, Artificial Sequence
  synthesized
ucagugagccgacucaauga

SEQ ID NO: 2653 - RNA, 20 nt, Artificial Sequence
  synthesized
ugagccgaaucaaugaacaa

SEQ ID NO: 2654 - RNA, 20 nt, Artificial Sequence
  synthesized
ugagccgacucaaugaacaa

SEQ ID NO: 2655 - RNA, 20 nt, Artificial Sequence
  synthesized
ugagucggcucacugaugag

SEQ ID NO: 2656 - RNA, 20 nt, Artificial Sequence
  synthesized
ugauucggcucacugaugag

SEQ ID NO: 2657 - RNA, 20 nt, Artificial Sequence
  synthesized
uguuaauuguucauugaguc

SEQ ID NO: 2658 - RNA, 20 nt, Artificial Sequence
  synthesized
uuaauuguucauugagucgg

SEQ ID NO: 2659 - RNA, 20 nt, Artificial Sequence
  synthesized
uuaauuguucauugauucgg

SEQ ID NO: 2660 - RNA, 20 nt, Artificial Sequence
  synthesized
uucggcucacugaugagccc

SEQ ID NO: 2661 - RNA, 20 nt, Artificial Sequence
  synthesized
uugagucggcucacugauga

SEQ ID NO: 2662 - RNA, 20 nt, Artificial Sequence
  synthesized
uugauucggcucacugauga

SEQ ID NO: 2663 - RNA, 20 nt, Artificial Sequence
  synthesized
uuguucauugagucggcuca

SEQ ID NO: 2664 - RNA, 20 nt, Artificial Sequence
  synthesized
uuguucauugauucggcuca

SEQ ID NO: 2665 - RNA, 20 nt, Artificial Sequence
  synthesized
aaaggaccugcgcuggguca

SEQ ID NO: 2666 - RNA, 20 nt, Artificial Sequence
  synthesized
aaaggaccugcucuggguca

SEQ ID NO: 2667 - RNA, 20 nt, Artificial Sequence
  synthesized
aaggaccugcgcugggucac

SEQ ID NO: 2668 - RNA, 20 nt, Artificial Sequence
  synthesized
aaggaccugcucugggucac

SEQ ID NO: 2669 - RNA, 20 nt, Artificial Sequence
  synthesized
acagugacccagagcagguc

SEQ ID NO: 2670 - RNA, 20 nt, Artificial Sequence
  synthesized
acagugacccagcgcagguc

SEQ ID NO: 2671 - RNA, 20 nt, Artificial Sequence
  synthesized
accugcgcugggucacuguc

SEQ ID NO: 2672 - RNA, 20 nt, Artificial Sequence
  synthesized
accugcucugggucacuguc

SEQ ID NO: 2673 - RNA, 20 nt, Artificial Sequence
  synthesized
acuaaaggaccugcgcuggg

SEQ ID NO: 2674 - RNA, 20 nt, Artificial Sequence
  synthesized
acuaaaggaccugcucuggg

SEQ ID NO: 2675 - RNA, 20 nt, Artificial Sequence
  synthesized
agagcagguccuuuagugac

SEQ ID NO: 2676 - RNA, 20 nt, Artificial Sequence
  synthesized
agcgcagguccuuuagugac

SEQ ID NO: 2677 - RNA, 20 nt, Artificial Sequence
  synthesized
aggaccugcgcugggucacu

SEQ ID NO: 2678 - RNA, 20 nt, Artificial Sequence
  synthesized
aggaccugcucugggucacu

SEQ ID NO: 2679 - RNA, 20 nt, Artificial Sequence
  synthesized
agugacccagagcagguccu

SEQ ID NO: 2680 - RNA, 20 nt, Artificial Sequence
  synthesized
agugacccagcgcagguccu

SEQ ID NO: 2681 - RNA, 20 nt, Artificial Sequence
  synthesized
cacuaaaggaccugcgcugg

SEQ ID NO: 2682 - RNA, 20 nt, Artificial Sequence
  synthesized
cacuaaaggaccugcucugg

SEQ ID NO: 2683 - RNA, 20 nt, Artificial Sequence
  synthesized
cagugacccagagcaggucc

SEQ ID NO: 2684 - RNA, 20 nt, Artificial Sequence
  synthesized
cagugacccagcgcaggucc

SEQ ID NO: 2685 - RNA, 20 nt, Artificial Sequence
  synthesized
ccagagcagguccuuuagug

SEQ ID NO: 2686 - RNA, 20 nt, Artificial Sequence
  synthesized
ccagcgcagguccuuuagug

SEQ ID NO: 2687 - RNA, 20 nt, Artificial Sequence
  synthesized
cccagagcagguccuuuagu

SEQ ID NO: 2688 - RNA, 20 nt, Artificial Sequence
  synthesized
cccagcgcagguccuuuagu

SEQ ID NO: 2689 - RNA, 20 nt, Artificial Sequence
  synthesized
ccugcgcugggucacugucc

SEQ ID NO: 2690 - RNA, 20 nt, Artificial Sequence
  synthesized
ccugcucugggucacugucc

SEQ ID NO: 2691 - RNA, 20 nt, Artificial Sequence
  synthesized
cgcugggucacuguccccua

SEQ ID NO: 2692 - RNA, 20 nt, Artificial Sequence
  synthesized
cuaaaggaccugcgcugggu

SEQ ID NO: 2693 - RNA, 20 nt, Artificial Sequence
  synthesized
cuaaaggaccugcucugggu

SEQ ID NO: 2694 - RNA, 20 nt, Artificial Sequence
  synthesized
cucugggucacuguccccua

SEQ ID NO: 2695 - RNA, 20 nt, Artificial Sequence
  synthesized
cugcgcugggucacuguccc

SEQ ID NO: 2696 - RNA, 20 nt, Artificial Sequence
  synthesized
cugcucugggucacuguccc

SEQ ID NO: 2697 - RNA, 20 nt, Artificial Sequence
  synthesized
gacagugacccagagcaggu

SEQ ID NO: 2698 - RNA, 20 nt, Artificial Sequence
  synthesized
gacagugacccagcgcaggu

SEQ ID NO: 2699 - RNA, 20 nt, Artificial Sequence
  synthesized
gacccagagcagguccuuua

SEQ ID NO: 2700 - RNA, 20 nt, Artificial Sequence
  synthesized
gacccagcgcagguccuuua

SEQ ID NO: 2701 - RNA, 20 nt, Artificial Sequence
  synthesized
gaccugcgcugggucacugu

SEQ ID NO: 2702 - RNA, 20 nt, Artificial Sequence
  synthesized
gaccugcucugggucacugu

SEQ ID NO: 2703 - RNA, 20 nt, Artificial Sequence
  synthesized
gagcagguccuuuagugacc

SEQ ID NO: 2704 - RNA, 20 nt, Artificial Sequence
  synthesized
gcgcagguccuuuagugacc

SEQ ID NO: 2705 - RNA, 20 nt, Artificial Sequence
  synthesized
gcgcugggucacuguccccu

SEQ ID NO: 2706 - RNA, 20 nt, Artificial Sequence
  synthesized
gcucugggucacuguccccu

SEQ ID NO: 2707 - RNA, 20 nt, Artificial Sequence
  synthesized
gcugggucacuguccccuac

SEQ ID NO: 2708 - RNA, 20 nt, Artificial Sequence
  synthesized
ggacagugacccagagcagg

SEQ ID NO: 2709 - RNA, 20 nt, Artificial Sequence
  synthesized
ggacagugacccagcgcagg

SEQ ID NO: 2710 - RNA, 20 nt, Artificial Sequence
  synthesized
ggaccugcgcugggucacug

SEQ ID NO: 2711 - RNA, 20 nt, Artificial Sequence
  synthesized
ggaccugcucugggucacug

SEQ ID NO: 2712 - RNA, 20 nt, Artificial Sequence
  synthesized
gggacagugacccagagcag

SEQ ID NO: 2713 - RNA, 20 nt, Artificial Sequence
  synthesized
gggacagugacccagcgcag

SEQ ID NO: 2714 - RNA, 20 nt, Artificial Sequence
  synthesized
ggggacagugacccagagca

SEQ ID NO: 2715 - RNA, 20 nt, Artificial Sequence
  synthesized
ggggacagugacccagcgca

SEQ ID NO: 2716 - RNA, 20 nt, Artificial Sequence
  synthesized
gugacccagagcagguccuu

SEQ ID NO: 2717 - RNA, 20 nt, Artificial Sequence
  synthesized
gugacccagcgcagguccuu

SEQ ID NO: 2718 - RNA, 20 nt, Artificial Sequence
  synthesized
uaaaggaccugcgcuggguc

SEQ ID NO: 2719 - RNA, 20 nt, Artificial Sequence
  synthesized
uaaaggaccugcucuggguc

SEQ ID NO: 2720 - RNA, 20 nt, Artificial Sequence
  synthesized
uaggggacagugacccagag

SEQ ID NO: 2721 - RNA, 20 nt, Artificial Sequence
  synthesized
uaggggacagugacccagcg

SEQ ID NO: 2722 - RNA, 20 nt, Artificial Sequence
  synthesized
ucacuaaaggaccugcgcug

SEQ ID NO: 2723 - RNA, 20 nt, Artificial Sequence
  synthesized
ucacuaaaggaccugcucug

SEQ ID NO: 2724 - RNA, 20 nt, Artificial Sequence
  synthesized
ucugggucacuguccccuac

SEQ ID NO: 2725 - RNA, 20 nt, Artificial Sequence
  synthesized
acuccgcuaauccacccuca

SEQ ID NO: 2726 - RNA, 20 nt, Artificial Sequence
  synthesized
agacuccgcuaauccacccu

SEQ ID NO: 2727 - RNA, 20 nt, Artificial Sequence
  synthesized
aggguggauuagcggagucu

SEQ ID NO: 2728 - RNA, 20 nt, Artificial Sequence
  synthesized
aguggggguugaggguggau

SEQ ID NO: 2729 - RNA, 20 nt, Artificial Sequence
  synthesized
auccacccucaacccccacu

SEQ ID NO: 2730 - RNA, 20 nt, Artificial Sequence
  synthesized
cagagacuccgcuaauccac

SEQ ID NO: 2731 - RNA, 20 nt, Artificial Sequence
  synthesized
ccagagacuccgcuaaucca

SEQ ID NO: 2732 - RNA, 20 nt, Artificial Sequence
  synthesized
ccgcuaauccacccucaacc

SEQ ID NO: 2733 - RNA, 20 nt, Artificial Sequence
  synthesized
cgcuaauccacccucaaccc

SEQ ID NO: 2734 - RNA, 20 nt, Artificial Sequence
  synthesized
cuaauccacccucaaccccc

SEQ ID NO: 2735 - RNA, 20 nt, Artificial Sequence
  synthesized
cuccgcuaauccacccucaa

SEQ ID NO: 2736 - RNA, 20 nt, Artificial Sequence
  synthesized
gaauuagcggagucucugga

SEQ ID NO: 2737 - RNA, 20 nt, Artificial Sequence
  synthesized
gacuccgcuaauccacccuc

SEQ ID NO: 2738 - RNA, 20 nt, Artificial Sequence
  synthesized
gagacuccgcuaauccaccc

SEQ ID NO: 2739 - RNA, 20 nt, Artificial Sequence
  synthesized
gaggguggauuagcggaguc

SEQ ID NO: 2740 - RNA, 20 nt, Artificial Sequence
  synthesized
gcuaauccacccucaacccc

SEQ ID NO: 2741 - RNA, 20 nt, Artificial Sequence
  synthesized
ggauuagcggagucucugga

SEQ ID NO: 2742 - RNA, 20 nt, Artificial Sequence
  synthesized
ggguugaggguggauuagcg

SEQ ID NO: 2743 - RNA, 20 nt, Artificial Sequence
  synthesized
gguugaggguggauuagcgg

SEQ ID NO: 2744 - RNA, 20 nt, Artificial Sequence
  synthesized
guggauuagcggagucucug

SEQ ID NO: 2745 - RNA, 20 nt, Artificial Sequence
  synthesized
guugaggguggauuagcgga

SEQ ID NO: 2746 - RNA, 20 nt, Artificial Sequence
  synthesized
uaauccacccucaaccccca

SEQ ID NO: 2747 - RNA, 20 nt, Artificial Sequence
  synthesized
uccagagacuccgcuaaucc

SEQ ID NO: 2748 - RNA, 20 nt, Artificial Sequence
  synthesized
uccgcuaauccacccucaac

SEQ ID NO: 2749 - RNA, 20 nt, Artificial Sequence
  synthesized
ugaggguggauuagcggagu

SEQ ID NO: 2750 - RNA, 20 nt, Artificial Sequence
  synthesized
uggggguugaggguggauua

SEQ ID NO: 2751 - RNA, 20 nt, Artificial Sequence
  synthesized
uuccagagacuccgcuaauc

SEQ ID NO: 2752 - RNA, 20 nt, Artificial Sequence
  synthesized
uugaggguggauuagcggag

SEQ ID NO: 2753 - RNA, 20 nt, Artificial Sequence
  synthesized
agcccgggccacauggggga

SEQ ID NO: 2754 - RNA, 20 nt, Artificial Sequence
  synthesized
augcagggagcccgggccac

SEQ ID NO: 2755 - RNA, 20 nt, Artificial Sequence
  synthesized
augcagggagccugggccac

SEQ ID NO: 2756 - RNA, 20 nt, Artificial Sequence
  synthesized
caggcucccugcaugagccc

SEQ ID NO: 2757 - RNA, 20 nt, Artificial Sequence
  synthesized
ccaggcucccugcaugagcc

SEQ ID NO: 2758 - RNA, 20 nt, Artificial Sequence
  synthesized
ccauguggcccaggcucccu

SEQ ID NO: 2759 - RNA, 20 nt, Artificial Sequence
  synthesized
ccauguggcccgggcucccu

SEQ ID NO: 2760 - RNA, 20 nt, Artificial Sequence
  synthesized
cccaggcucccugcaugagc

SEQ ID NO: 2761 - RNA, 20 nt, Artificial Sequence
  synthesized
cccauguggcccgggcuccc

SEQ ID NO: 2762 - RNA, 20 nt, Artificial Sequence
  synthesized
ccccauguggcccaggcucc

SEQ ID NO: 2763 - RNA, 20 nt, Artificial Sequence
  synthesized
ccccauguggcccgggcucc

SEQ ID NO: 2764 - RNA, 20 nt, Artificial Sequence
  synthesized
cccccauguggcccaggcuc

SEQ ID NO: 2765 - RNA, 20 nt, Artificial Sequence
  synthesized
cccccauguggcccgggcuc

SEQ ID NO: 2766 - RNA, 20 nt, Artificial Sequence
  synthesized
cccgggcucccugcaugagc

SEQ ID NO: 2767 - RNA, 20 nt, Artificial Sequence
  synthesized
ccgggcucccugcaugagcc

SEQ ID NO: 2768 - RNA, 20 nt, Artificial Sequence
  synthesized
cgggcucccugcaugagccc

SEQ ID NO: 2769 - RNA, 20 nt, Artificial Sequence
  synthesized
cucaugcagggagcccgggc

SEQ ID NO: 2770 - RNA, 20 nt, Artificial Sequence
  synthesized
cuggucccccauguggcccg

SEQ ID NO: 2771 - RNA, 20 nt, Artificial Sequence
  synthesized
gagcccgggccacauggggg

SEQ ID NO: 2772 - RNA, 20 nt, Artificial Sequence
  synthesized
gagccugggccacauggggg

SEQ ID NO: 2773 - RNA, 20 nt, Artificial Sequence
  synthesized
gcccaggcucccugcaugag

SEQ ID NO: 2774 - RNA, 20 nt, Artificial Sequence
  synthesized
gcccgggccacaugggggac

SEQ ID NO: 2775 - RNA, 20 nt, Artificial Sequence
  synthesized
gcccgggcucccugcaugag

SEQ ID NO: 2776 - RNA, 20 nt, Artificial Sequence
  synthesized
gccugggccacaugggggac

SEQ ID NO: 2777 - RNA, 20 nt, Artificial Sequence
  synthesized
gcucaugcagggagcccggg

SEQ ID NO: 2778 - RNA, 20 nt, Artificial Sequence
  synthesized
gcucaugcagggagccuggg

SEQ ID NO: 2779 - RNA, 20 nt, Artificial Sequence
  synthesized
ggagcccgggccacaugggg

SEQ ID NO: 2780 - RNA, 20 nt, Artificial Sequence
  synthesized
ggagccugggccacaugggg

SEQ ID NO: 2781 - RNA, 20 nt, Artificial Sequence
  synthesized
ggcccgggcucccugcauga

SEQ ID NO: 2782 - RNA, 20 nt, Artificial Sequence
  synthesized
ggcucaugcagggagcccgg

SEQ ID NO: 2783 - RNA, 20 nt, Artificial Sequence
  synthesized
ggcucaugcagggagccugg

SEQ ID NO: 2784 - RNA, 20 nt, Artificial Sequence
  synthesized
ggucccccauguggcccagg

SEQ ID NO: 2785 - RNA, 20 nt, Artificial Sequence
  synthesized
ggucccccauguggcccggg

SEQ ID NO: 2786 - RNA, 20 nt, Artificial Sequence
  synthesized
gucccccauguggcccaggc

SEQ ID NO: 2787 - RNA, 20 nt, Artificial Sequence
  synthesized
gucccccauguggcccgggc

SEQ ID NO: 2788 - RNA, 20 nt, Artificial Sequence
  synthesized
guggcccaggcucccugcau

SEQ ID NO: 2789 - RNA, 20 nt, Artificial Sequence
  synthesized
guggcccgggcucccugcau

SEQ ID NO: 2790 - RNA, 20 nt, Artificial Sequence
  synthesized
ucaugcagggagcccgggcc

SEQ ID NO: 2791 - RNA, 20 nt, Artificial Sequence
  synthesized
ucccccauguggcccgggcu

SEQ ID NO: 2792 - RNA, 20 nt, Artificial Sequence
  synthesized
uggcccaggcucccugcaug

SEQ ID NO: 2793 - RNA, 20 nt, Artificial Sequence
  synthesized
uggcccgggcucccugcaug

SEQ ID NO: 2794 - RNA, 20 nt, Artificial Sequence
  synthesized
uggucccccauguggcccag

SEQ ID NO: 2795 - RNA, 20 nt, Artificial Sequence
  synthesized
uggucccccauguggcccgg

SEQ ID NO: 2796 - RNA, 20 nt, Artificial Sequence
  synthesized
aaagccgaggaagggcuguu

SEQ ID NO: 2797 - RNA, 20 nt, Artificial Sequence
  synthesized
acagcccuuccucggcuucg

SEQ ID NO: 2798 - RNA, 20 nt, Artificial Sequence
  synthesized
acagcccuuccucggcuuug

SEQ ID NO: 2799 - RNA, 20 nt, Artificial Sequence
  synthesized
accagucggccuccaaagcc

SEQ ID NO: 2800 - RNA, 20 nt, Artificial Sequence
  synthesized
accagucggccuccgaagcc

SEQ ID NO: 2801 - RNA, 20 nt, Artificial Sequence
  synthesized
agcccuuccucggcuucgga

SEQ ID NO: 2802 - RNA, 20 nt, Artificial Sequence
  synthesized
agcccuuccucggcuuugga

SEQ ID NO: 2803 - RNA, 20 nt, Artificial Sequence
  synthesized
aggcaaccagucggccucca

SEQ ID NO: 2804 - RNA, 20 nt, Artificial Sequence
  synthesized
aggcaaccagucggccuccg

SEQ ID NO: 2805 - RNA, 20 nt, Artificial Sequence
  synthesized
agucggccuccgaagccgag

SEQ ID NO: 2806 - RNA, 20 nt, Artificial Sequence
  synthesized
caaagccgaggaagggcugu

SEQ ID NO: 2807 - RNA, 20 nt, Artificial Sequence
  synthesized
caaccagucggccuccaaag

SEQ ID NO: 2808 - RNA, 20 nt, Artificial Sequence
  synthesized
caaccagucggccuccgaag

SEQ ID NO: 2809 - RNA, 20 nt, Artificial Sequence
  synthesized
ccaaagccgaggaagggcug

SEQ ID NO: 2810 - RNA, 20 nt, Artificial Sequence
  synthesized
cccuuccucggcuucggagg

SEQ ID NO: 2811 - RNA, 20 nt, Artificial Sequence
  synthesized
cccuuccucggcuuuggagg

SEQ ID NO: 2812 - RNA, 20 nt, Artificial Sequence
  synthesized
ccgaagccgaggaagggcug

SEQ ID NO: 2813 - RNA, 20 nt, Artificial Sequence
  synthesized
ccuccaaagccgaggaaggg

SEQ ID NO: 2814 - RNA, 20 nt, Artificial Sequence
  synthesized
ccuccgaagccgaggaaggg

SEQ ID NO: 2815 - RNA, 20 nt, Artificial Sequence
  synthesized
cggcuucggaggccgacugg

SEQ ID NO: 2816 - RNA, 20 nt, Artificial Sequence
  synthesized
cggcuuuggaggccgacugg

SEQ ID NO: 2817 - RNA, 20 nt, Artificial Sequence
  synthesized
cuccaaagccgaggaagggc

SEQ ID NO: 2818 - RNA, 20 nt, Artificial Sequence
  synthesized
cuccgaagccgaggaagggc

SEQ ID NO: 2819 - RNA, 20 nt, Artificial Sequence
  synthesized
cucggcuucggaggccgacu

SEQ ID NO: 2820 - RNA, 20 nt, Artificial Sequence
  synthesized
cucggcuuuggaggccgacu

SEQ ID NO: 2821 - RNA, 20 nt, Artificial Sequence
  synthesized
cuuccucggcuucggaggcc

SEQ ID NO: 2822 - RNA, 20 nt, Artificial Sequence
  synthesized
cuucggaggccgacugguug

SEQ ID NO: 2823 - RNA, 20 nt, Artificial Sequence
  synthesized
cuuuggaggccgacugguug

SEQ ID NO: 2824 - RNA, 20 nt, Artificial Sequence
  synthesized
gcaaccagucggccuccaaa

SEQ ID NO: 2825 - RNA, 20 nt, Artificial Sequence
  synthesized
gcaaccagucggccuccgaa

SEQ ID NO: 2826 - RNA, 20 nt, Artificial Sequence
  synthesized
gcccuuccucggcuucggag

SEQ ID NO: 2827 - RNA, 20 nt, Artificial Sequence
  synthesized
gcccuuccucggcuuuggag

SEQ ID NO: 2828 - RNA, 20 nt, Artificial Sequence
  synthesized
gccuccaaagccgaggaagg

SEQ ID NO: 2829 - RNA, 20 nt, Artificial Sequence
  synthesized
gccuccgaagccgaggaagg

SEQ ID NO: 2830 - RNA, 20 nt, Artificial Sequence
  synthesized
gcuucggaggccgacugguu

SEQ ID NO: 2831 - RNA, 20 nt, Artificial Sequence
  synthesized
gcuuuggaggccgacugguu

SEQ ID NO: 2832 - RNA, 20 nt, Artificial Sequence
  synthesized
ggcaaccagucggccuccaa

SEQ ID NO: 2833 - RNA, 20 nt, Artificial Sequence
  synthesized
ggcaaccagucggccuccga

SEQ ID NO: 2834 - RNA, 20 nt, Artificial Sequence
  synthesized
ggccuccaaagccgaggaag

SEQ ID NO: 2835 - RNA, 20 nt, Artificial Sequence
  synthesized
ggccuccgaagccgaggaag

SEQ ID NO: 2836 - RNA, 20 nt, Artificial Sequence
  synthesized
ggcuucggaggccgacuggu

SEQ ID NO: 2837 - RNA, 20 nt, Artificial Sequence
  synthesized
ggcuuuggaggccgacuggu

SEQ ID NO: 2838 - RNA, 20 nt, Artificial Sequence
  synthesized
gucggccuccaaagccgagg

SEQ ID NO: 2839 - RNA, 20 nt, Artificial Sequence
  synthesized
gucggccuccgaagccgagg

SEQ ID NO: 2840 - RNA, 20 nt, Artificial Sequence
  synthesized
uccaaagccgaggaagggcu

SEQ ID NO: 2841 - RNA, 20 nt, Artificial Sequence
  synthesized
uccgaagccgaggaagggcu

SEQ ID NO: 2842 - RNA, 20 nt, Artificial Sequence
  synthesized
uccucggcuucggaggccga

SEQ ID NO: 2843 - RNA, 20 nt, Artificial Sequence
  synthesized
uccucggcuuuggaggccga

SEQ ID NO: 2844 - RNA, 20 nt, Artificial Sequence
  synthesized
ucggaggccgacugguugcc

SEQ ID NO: 2845 - RNA, 20 nt, Artificial Sequence
  synthesized
ucggcuucggaggccgacug

SEQ ID NO: 2846 - RNA, 20 nt, Artificial Sequence
  synthesized
ucggcuuuggaggccgacug

SEQ ID NO: 2847 - RNA, 20 nt, Artificial Sequence
  synthesized
uuccucggcuucggaggccg

SEQ ID NO: 2848 - RNA, 20 nt, Artificial Sequence
  synthesized
uuccucggcuuuggaggccg

SEQ ID NO: 2849 - RNA, 20 nt, Artificial Sequence
  synthesized
uucggaggccgacugguugc

SEQ ID NO: 2850 - RNA, 20 nt, Artificial Sequence
  synthesized
uuggaggccgacugguugcc

SEQ ID NO: 2851 - RNA, 20 nt, Artificial Sequence
  synthesized
uuuggaggccgacugguugc

SEQ ID NO: 2852 - RNA, 20 nt, Artificial Sequence
  synthesized
acucagcccagugaggggug

SEQ ID NO: 2853 - RNA, 20 nt, Artificial Sequence
  synthesized
acugggcugagucagauggc

SEQ ID NO: 2854 - RNA, 20 nt, Artificial Sequence
  synthesized
aggccaccccucacugggcu

SEQ ID NO: 2855 - RNA, 20 nt, Artificial Sequence
  synthesized
agggagggguggccuggggg

SEQ ID NO: 2856 - RNA, 20 nt, Artificial Sequence
  synthesized
agugagggguggccuggggg

SEQ ID NO: 2857 - RNA, 20 nt, Artificial Sequence
  synthesized
caccccucacugggcugagu

SEQ ID NO: 2858 - RNA, 20 nt, Artificial Sequence
  synthesized
cacugggcugagucagaugg

SEQ ID NO: 2859 - RNA, 20 nt, Artificial Sequence
  synthesized
cagggagggguggccugggg

SEQ ID NO: 2860 - RNA, 20 nt, Artificial Sequence
  synthesized
cagugagggguggccugggg

SEQ ID NO: 2861 - RNA, 20 nt, Artificial Sequence
  synthesized
ccaccccucacugggcugag

SEQ ID NO: 2862 - RNA, 20 nt, Artificial Sequence
  synthesized
ccaccccucccugggcugag

SEQ ID NO: 2863 - RNA, 20 nt, Artificial Sequence
  synthesized
cccaggccaccccucacugg

SEQ ID NO: 2864 - RNA, 20 nt, Artificial Sequence
  synthesized
ccccaggccaccccucacug

SEQ ID NO: 2865 - RNA, 20 nt, Artificial Sequence
  synthesized
cccucacugggcugagucag

SEQ ID NO: 2866 - RNA, 20 nt, Artificial Sequence
  synthesized
cccucccugggcugagucag

SEQ ID NO: 2867 - RNA, 20 nt, Artificial Sequence
  synthesized
cccugggcugagucagaugg

SEQ ID NO: 2868 - RNA, 20 nt, Artificial Sequence
  synthesized
ccugggcugagucagauggc

SEQ ID NO: 2869 - RNA, 20 nt, Artificial Sequence
  synthesized
cucacugggcugagucagau

SEQ ID NO: 2870 - RNA, 20 nt, Artificial Sequence
  synthesized
cucagcccagugaggggugg

SEQ ID NO: 2871 - RNA, 20 nt, Artificial Sequence
  synthesized
cucccugggcugagucagau

SEQ ID NO: 2872 - RNA, 20 nt, Artificial Sequence
  synthesized
cugacucagcccagggaggg

SEQ ID NO: 2873 - RNA, 20 nt, Artificial Sequence
  synthesized
cugacucagcccagugaggg

SEQ ID NO: 2874 - RNA, 20 nt, Artificial Sequence
  synthesized
gccaucugacucagcccagg

SEQ ID NO: 2875 - RNA, 20 nt, Artificial Sequence
  synthesized
gccaucugacucagcccagu

SEQ ID NO: 2876 - RNA, 20 nt, Artificial Sequence
  synthesized
ggagggguggccugggggac

SEQ ID NO: 2877 - RNA, 20 nt, Artificial Sequence
  synthesized
gggagggguggccuggggga

SEQ ID NO: 2878 - RNA, 20 nt, Artificial Sequence
  synthesized
gucccccaggccaccccuca

SEQ ID NO: 2879 - RNA, 20 nt, Artificial Sequence
  synthesized
gucccccaggccaccccucc

SEQ ID NO: 2880 - RNA, 20 nt, Artificial Sequence
  synthesized
gugagggguggccuggggga

SEQ ID NO: 2881 - RNA, 20 nt, Artificial Sequence
  synthesized
ucacugggcugagucagaug

SEQ ID NO: 2882 - RNA, 20 nt, Artificial Sequence
  synthesized
ucagcccagggagggguggc

SEQ ID NO: 2883 - RNA, 20 nt, Artificial Sequence
  synthesized
ucagcccagugagggguggc

SEQ ID NO: 2884 - RNA, 20 nt, Artificial Sequence
  synthesized
ucccugggcugagucagaug

SEQ ID NO: 2885 - RNA, 20 nt, Artificial Sequence
  synthesized
ugagggguggccugggggac

SEQ ID NO: 2886 - RNA, 20 nt, Artificial Sequence
  synthesized
aaacccuuccccuauuaccg

SEQ ID NO: 2887 - RNA, 20 nt, Artificial Sequence
  synthesized
aagggauuguggggccugcc

SEQ ID NO: 2888 - RNA, 20 nt, Artificial Sequence
  synthesized
aaggguuuguggggccugcc

SEQ ID NO: 2889 - RNA, 20 nt, Artificial Sequence
  synthesized
aauaggggaaggguuugugg

SEQ ID NO: 2890 - RNA, 20 nt, Artificial Sequence
  synthesized
aaucccuuccccuauuaccg

SEQ ID NO: 2891 - RNA, 20 nt, Artificial Sequence
  synthesized
acaaacccuuccccuauuac

SEQ ID NO: 2892 - RNA, 20 nt, Artificial Sequence
  synthesized
acaaucccuuccccuauuac

SEQ ID NO: 2893 - RNA, 20 nt, Artificial Sequence
  synthesized
acccuuccccuauuaccgcc

SEQ ID NO: 2894 - RNA, 20 nt, Artificial Sequence
  synthesized
aggccccacaaacccuuccc

SEQ ID NO: 2895 - RNA, 20 nt, Artificial Sequence
  synthesized
aggccccacaaucccuuccc

SEQ ID NO: 2896 - RNA, 20 nt, Artificial Sequence
  synthesized
agggauuguggggccugccc

SEQ ID NO: 2897 - RNA, 20 nt, Artificial Sequence
  synthesized
aggggaaggguuuguggggc

SEQ ID NO: 2898 - RNA, 20 nt, Artificial Sequence
  synthesized
aggggcaggccccacaaacc

SEQ ID NO: 2899 - RNA, 20 nt, Artificial Sequence
  synthesized
aggggcaggccccacaaucc

SEQ ID NO: 2900 - RNA, 20 nt, Artificial Sequence
  synthesized
aggguuuguggggccugccc

SEQ ID NO: 2901 - RNA, 20 nt, Artificial Sequence
  synthesized
auaggggaagggauuguggg

SEQ ID NO: 2902 - RNA, 20 nt, Artificial Sequence
  synthesized
auaggggaaggguuuguggg

SEQ ID NO: 2903 - RNA, 20 nt, Artificial Sequence
  synthesized
caaacccuuccccuauuacc

SEQ ID NO: 2904 - RNA, 20 nt, Artificial Sequence
  synthesized
caaucccuuccccuauuacc

SEQ ID NO: 2905 - RNA, 20 nt, Artificial Sequence
  synthesized
cacaaacccuuccccuauua

SEQ ID NO: 2906 - RNA, 20 nt, Artificial Sequence
  synthesized
cacaaucccuuccccuauua

SEQ ID NO: 2907 - RNA, 20 nt, Artificial Sequence
  synthesized
caggccccacaaacccuucc

SEQ ID NO: 2908 - RNA, 20 nt, Artificial Sequence
  synthesized
caggccccacaaucccuucc

SEQ ID NO: 2909 - RNA, 20 nt, Artificial Sequence
  synthesized
ccacaaacccuuccccuauu

SEQ ID NO: 2910 - RNA, 20 nt, Artificial Sequence
  synthesized
ccacaaucccuuccccuauu

SEQ ID NO: 2911 - RNA, 20 nt, Artificial Sequence
  synthesized
accaccguccccaggugaac

SEQ ID NO: 2912 - RNA, 20 nt, Artificial Sequence
  synthesized
acucaccaccguccccaggu

SEQ ID NO: 2913 - RNA, 20 nt, Artificial Sequence
  synthesized
auccccaggugaaccauucc

SEQ ID NO: 2914 - RNA, 20 nt, Artificial Sequence
  synthesized
caccaccguccccaggugaa

SEQ ID NO: 2915 - RNA, 20 nt, Artificial Sequence
  synthesized
cauccccaggugaaccauuc

SEQ ID NO: 2916 - RNA, 20 nt, Artificial Sequence
  synthesized
ccaccguccccaggugaacc

SEQ ID NO: 2917 - RNA, 20 nt, Artificial Sequence
  synthesized
ccauccccaggugaaccauu

SEQ ID NO: 2918 - RNA, 20 nt, Artificial Sequence
  synthesized
ccguccccaggugaaccauu

SEQ ID NO: 2919 - RNA, 20 nt, Artificial Sequence
  synthesized
cguccccaggugaaccauuc

SEQ ID NO: 2920 - RNA, 20 nt, Artificial Sequence
  synthesized
cucaccaccguccccaggug

SEQ ID NO: 2921 - RNA, 20 nt, Artificial Sequence
  synthesized
gaaugguucaccuggggacg

SEQ ID NO: 2922 - RNA, 20 nt, Artificial Sequence
  synthesized
guccccaggugaaccauucc

SEQ ID NO: 2923 - RNA, 20 nt, Artificial Sequence
  synthesized
guucaccuggggacgguggu

SEQ ID NO: 2924 - RNA, 20 nt, Artificial Sequence
  synthesized
ucaccuggggacggugguga

SEQ ID NO: 2925 - RNA, 20 nt, Artificial Sequence
  synthesized
uucaccuggggacgguggug

SEQ ID NO: 2926 - RNA, 20 nt, Artificial Sequence
  synthesized
acagcugaggagaagggagg

SEQ ID NO: 2927 - RNA, 20 nt, Artificial Sequence
  synthesized
ccucccuucuccucagcugc

SEQ ID NO: 2928 - RNA, 20 nt, Artificial Sequence
  synthesized
ccucccuucuccucagcugu

SEQ ID NO: 2929 - RNA, 20 nt, Artificial Sequence
  synthesized
cucccuucuccucagcugca

SEQ ID NO: 2930 - RNA, 20 nt, Artificial Sequence
  synthesized
cucccuucuccucagcugua

SEQ ID NO: 2931 - RNA, 20 nt, Artificial Sequence
  synthesized
gacuacagcugaggagaagg

SEQ ID NO: 2932 - RNA, 20 nt, Artificial Sequence
  synthesized
gacugcagcugaggagaagg

SEQ ID NO: 2933 - RNA, 20 nt, Artificial Sequence
  synthesized
gcagcugaggagaagggagg

SEQ ID NO: 2934 - RNA, 20 nt, Artificial Sequence
  synthesized
ucccuucuccucagcugcag

SEQ ID NO: 2935 - RNA, 20 nt, Artificial Sequence
  synthesized
ucccuucuccucagcuguag

SEQ ID NO: 2936 - RNA, 20 nt, Artificial Sequence
  synthesized
ugcagcugaggagaagggag

SEQ ID NO: 2937 - RNA, 20 nt, Artificial Sequence
  synthesized
ccccacaaacccuuccccua

SEQ ID NO: 2938 - RNA, 20 nt, Artificial Sequence
  synthesized
ccccacaaucccuuccccua

SEQ ID NO: 2939 - RNA, 20 nt, Artificial Sequence
  synthesized
cgguaauaggggaagggauu

SEQ ID NO: 2940 - RNA, 20 nt, Artificial Sequence
  synthesized
cgguaauaggggaaggguuu

SEQ ID NO: 2941 - RNA, 20 nt, Artificial Sequence
  synthesized
gaagggauuguggggccugc

SEQ ID NO: 2942 - RNA, 20 nt, Artificial Sequence
  synthesized
gaaggguuuguggggccugc

SEQ ID NO: 2943 - RNA, 20 nt, Artificial Sequence
  synthesized
gaggggcaggccccacaaac

SEQ ID NO: 2944 - RNA, 20 nt, Artificial Sequence
  synthesized
gaggggcaggccccacaauc

SEQ ID NO: 2945 - RNA, 20 nt, Artificial Sequence
  synthesized
gcaggccccacaaacccuuc

SEQ ID NO: 2946 - RNA, 20 nt, Artificial Sequence
  synthesized
gccccacaaacccuuccccu

SEQ ID NO: 2947 - RNA, 20 nt, Artificial Sequence
  synthesized
gccccacaaucccuuccccu

SEQ ID NO: 2948 - RNA, 20 nt, Artificial Sequence
  synthesized
ggaagggauuguggggccug

SEQ ID NO: 2949 - RNA, 20 nt, Artificial Sequence
  synthesized
ggaaggguuuguggggccug

SEQ ID NO: 2950 - RNA, 20 nt, Artificial Sequence
  synthesized
ggaggggcaggccccacaaa

SEQ ID NO: 2951 - RNA, 20 nt, Artificial Sequence
  synthesized
ggaggggcaggccccacaau

SEQ ID NO: 2952 - RNA, 20 nt, Artificial Sequence
  synthesized
ggauuguggggccugccccu

SEQ ID NO: 2953 - RNA, 20 nt, Artificial Sequence
  synthesized
ggcaggccccacaaacccuu

SEQ ID NO: 2954 - RNA, 20 nt, Artificial Sequence
  synthesized
ggcaggccccacaaucccuu

SEQ ID NO: 2955 - RNA, 20 nt, Artificial Sequence
  synthesized
ggccccacaaacccuucccc

SEQ ID NO: 2956 - RNA, 20 nt, Artificial Sequence
  synthesized
ggcgguaauaggggaaggga

SEQ ID NO: 2957 - RNA, 20 nt, Artificial Sequence
  synthesized
ggcgguaauaggggaagggu

SEQ ID NO: 2958 - RNA, 20 nt, Artificial Sequence
  synthesized
gggaagggauuguggggccu

SEQ ID NO: 2959 - RNA, 20 nt, Artificial Sequence
  synthesized
gggaaggguuuguggggccu

SEQ ID NO: 2960 - RNA, 20 nt, Artificial Sequence
  synthesized
gggcaggccccacaaacccu

SEQ ID NO: 2961 - RNA, 20 nt, Artificial Sequence
  synthesized
gggcaggccccacaaucccu

SEQ ID NO: 2962 - RNA, 20 nt, Artificial Sequence
  synthesized
ggggaagggauuguggggcc

SEQ ID NO: 2963 - RNA, 20 nt, Artificial Sequence
  synthesized
ggggaaggguuuguggggcc

SEQ ID NO: 2964 - RNA, 20 nt, Artificial Sequence
  synthesized
ggggcaggccccacaaaccc

SEQ ID NO: 2965 - RNA, 20 nt, Artificial Sequence
  synthesized
ggggcaggccccacaauccc

SEQ ID NO: 2966 - RNA, 20 nt, Artificial Sequence
  synthesized
ggguuuguggggccugcccc

SEQ ID NO: 2967 - RNA, 20 nt, Artificial Sequence
  synthesized
gguuuguggggccugccccu

SEQ ID NO: 2968 - RNA, 20 nt, Artificial Sequence
  synthesized
uaggggaagggauugugggg

SEQ ID NO: 2969 - RNA, 20 nt, Artificial Sequence
  synthesized
uaggggaaggguuugugggg

SEQ ID NO: 2970 - RNA, 20 nt, Artificial Sequence
  synthesized
ucccuuccccuauuaccgcc

SEQ ID NO: 2971 - RNA, 20 nt, Artificial Sequence
  synthesized
uuuguggggccugccccucc

SEQ ID NO: 2972 - RNA, 20 nt, Artificial Sequence
  synthesized
aagcacugggccaugaaucc

SEQ ID NO: 2973 - RNA, 20 nt, Artificial Sequence
  synthesized
aagggagggguacugcuucg

SEQ ID NO: 2974 - RNA, 20 nt, Artificial Sequence
  synthesized
aagggagggguacugcuucu

SEQ ID NO: 2975 - RNA, 20 nt, Artificial Sequence
  synthesized
aaucagaagcaguaccccuc

SEQ ID NO: 2976 - RNA, 20 nt, Artificial Sequence
  synthesized
aauccgaagcaguaccccuc

SEQ ID NO: 2977 - RNA, 20 nt, Artificial Sequence
  synthesized
agaagcaguaccccucccuu

SEQ ID NO: 2978 - RNA, 20 nt, Artificial Sequence
  synthesized
agcacugggccaugaaucag

SEQ ID NO: 2979 - RNA, 20 nt, Artificial Sequence
  synthesized
agcacugggccaugaauccg

SEQ ID NO: 2980 - RNA, 20 nt, Artificial Sequence
  synthesized
agggagggguacugcuucgg

SEQ ID NO: 2981 - RNA, 20 nt, Artificial Sequence
  synthesized
agggagggguacugcuucug

SEQ ID NO: 2982 - RNA, 20 nt, Artificial Sequence
  synthesized
agggguacugcuucggauuc

SEQ ID NO: 2983 - RNA, 20 nt, Artificial Sequence
  synthesized
agggguacugcuucugauuc

SEQ ID NO: 2984 - RNA, 20 nt, Artificial Sequence
  synthesized
aucagaagcaguaccccucc

SEQ ID NO: 2985 - RNA, 20 nt, Artificial Sequence
  synthesized
auccgaagcaguaccccucc

SEQ ID NO: 2986 - RNA, 20 nt, Artificial Sequence
  synthesized
augaaucagaagcaguaccc

SEQ ID NO: 2987 - RNA, 20 nt, Artificial Sequence
  synthesized
augaauccgaagcaguaccc

SEQ ID NO: 2988 - RNA, 20 nt, Artificial Sequence
  synthesized
cacugggccaugaaucagaa

SEQ ID NO: 2989 - RNA, 20 nt, Artificial Sequence
  synthesized
cacugggccaugaauccgaa

SEQ ID NO: 2990 - RNA, 20 nt, Artificial Sequence
  synthesized
cagaagcaguaccccucccu

SEQ ID NO: 2991 - RNA, 20 nt, Artificial Sequence
  synthesized
caugaaucagaagcaguacc

SEQ ID NO: 2992 - RNA, 20 nt, Artificial Sequence
  synthesized
caugaauccgaagcaguacc

SEQ ID NO: 2993 - RNA, 20 nt, Artificial Sequence
  synthesized
ccaugaaucagaagcaguac

SEQ ID NO: 2994 - RNA, 20 nt, Artificial Sequence
  synthesized
ccaugaauccgaagcaguac

SEQ ID NO: 2995 - RNA, 20 nt, Artificial Sequence
  synthesized
ccgaagcaguaccccucccu

SEQ ID NO: 2996 - RNA, 20 nt, Artificial Sequence
  synthesized
cgaagcaguaccccucccuu

SEQ ID NO: 2997 - RNA, 20 nt, Artificial Sequence
  synthesized
cggauucauggcccagugcu

SEQ ID NO: 2998 - RNA, 20 nt, Artificial Sequence
  synthesized
cugauucauggcccagugcu

SEQ ID NO: 2999 - RNA, 20 nt, Artificial Sequence
  synthesized
cugggccaugaaucagaagc

SEQ ID NO: 3000 - RNA, 20 nt, Artificial Sequence
  synthesized
cugggccaugaauccgaagc

SEQ ID NO: 3001 - RNA, 20 nt, Artificial Sequence
  synthesized
cuucggauucauggcccagu

SEQ ID NO: 3002 - RNA, 20 nt, Artificial Sequence
  synthesized
gaaucagaagcaguaccccu

SEQ ID NO: 3003 - RNA, 20 nt, Artificial Sequence
  synthesized
gaauccgaagcaguaccccu

SEQ ID NO: 3004 - RNA, 20 nt, Artificial Sequence
  synthesized
gccaugaaucagaagcagua

SEQ ID NO: 3005 - RNA, 20 nt, Artificial Sequence
  synthesized
gccaugaauccgaagcagua

SEQ ID NO: 3006 - RNA, 20 nt, Artificial Sequence
  synthesized
gcuucggauucauggcccag

SEQ ID NO: 3007 - RNA, 20 nt, Artificial Sequence
  synthesized
gcuucugauucauggcccag

SEQ ID NO: 3008 - RNA, 20 nt, Artificial Sequence
  synthesized
ggagggguacugcuucggau

SEQ ID NO: 3009 - RNA, 20 nt, Artificial Sequence
  synthesized
ggagggguacugcuucugau

SEQ ID NO: 3010 - RNA, 20 nt, Artificial Sequence
  synthesized
ggccaugaaucagaagcagu

1-42. (canceled)

43. An isolated guide RNA comprising a nucleic acid sequence consisting of 17-24 nucleotides and containing the sequence of SEQ ID NO: 159, 160, 161, 3013, or 3014, wherein the guide RNA is:
a) a single guide RNA (sgRNA); or
b) a CRISPR RNA (crRNA) and a transactivating RNA (tracrRNA).

44. A method for inactivating a mutant Inosine Monophosphate Dehydrogenase 1 (IMPDH1) allele in a human cell, the method comprising delivering to the cell a composition comprising
a) the isolated guide RNA of claim 1; and
b) a CRISPR nuclease,
wherein the human cell comprises a mutant IMPDH1 allele and a functional IMPDH1 allele,
wherein the sequence of the rs2228075 SNP position in the mutant IMPDH1 allele differs from the sequence of the rs2228075 SNP position in the functional IMPDH1 allele,
wherein the guide RNA targets the CRIPSR nuclease to the rs2228075 SNP position of the mutant IMPDH1 allele to create a DNA break in the mutant IMPDH1 allele,
thereby inactivating the mutant IMPDH1 allele and maintaining the functional IMPDH1 allele intact.

45. The method of claim 44, further comprising subjecting the mutant IMPDH1 allele to an insertion or deletion by an error prone non-homologous end joining (NHEJ) mechanism to generate a frameshift in the mutant IMPDH1 allele sequence.

46. The method of claim 45, wherein the frameshift creates an early stop codon in the mutant IMPDH1 allele.

47. The method of claim 45, wherein the frameshift results in nonsense-mediated mRNA decay of a transcript of the mutant IMPDH1 allele.

48. The method of claim 44, wherein the inactivating results in a truncated protein encoded by the mutated IMPDH1 allele and a functional protein encoded by the functional IMPDH1 allele.

49. An isolated guide RNA comprising a nucleic acid sequence consisting of 17-24 nucleotides and containing the sequence of SEQ ID NO: 274, 276, 282, 3011, 3012, or 3015, wherein the guide RNA is:
a) a single guide RNA (sgRNA); or
b) a CRISPR RNA (crRNA) and transactivating RNA (tracrRNA).

50. A method for inactivating a mutant Inosine Monophosphate Dehydrogenase 1 (IMPDH1) allele in a human cell, the method comprising delivering to the cell a composition comprising
a) the isolated guide RNA of claim 49; and
b) a CRISPR nuclease,
wherein the human cell comprises a mutant IMPDH1 allele and a functional IMPDH1 allele,
wherein the sequence of the rs2288550 SNP position in the mutant IMPDH1 allele differs from the sequence of the rs2288550 SNP position in the functional IMPDH1 allele,
wherein the guide RNA target the CRIPSR nuclease to the rs2288550 SNP position of the mutant IMPDH1 allele to create a DNA break in the mutant IMPDH1 allele,
thereby inactivating the mutant IMPDH1 allele and maintaining the functional IMPDH1 allele intact.

51. The method of claim 50, further comprising subjecting the mutant IMPDH1 allele to an insertion or deletion by an error prone non-homologous end joining (NHEJ) mechanism to generate a frameshift in the mutant IMPDH1 allele sequence.

52. The method of claim 51, wherein the frameshift creates an early stop codon in the mutant IMPDH1 allele.

53. The method of claim 51, wherein the frameshift results in nonsense-mediated mRNA decay of a transcript of the mutant IMPDH1 allele.

54. The method of claim 50, wherein the inactivating results in a truncated protein encoded by the mutated IMPDH1 allele and a functional protein encoded by the functional IMPDH1 allele.
